(19) United States
(12) Patent Application Publication
(10) Pub. No.: US 2020/0255851 A1
(43) Pub. Date: Aug. 13, 2020

(54) COMPOSITIONS FOR TREATING CITRUS DISEASE AND PROMOTING YIELD INCREASE IN ROW CROPS

(71) Applicant: Spogen Biotech Inc., St. Louis, MO (US)

(72) Inventors: Brian Thompson, Creve Coeur, MO (US); Michelle Leslie, Webster Groves, MO (US)

(21) Appl. No.: 16/749,576

(22) Filed: Jan. 22, 2020

Related U.S. Application Data
(60) Provisional application No. 62/796,010, filed on Jan. 23, 2019.

(51) Int. Cl. C12N 15/82; C12N 9/64; C12N 9/24; C07K 14/32; C07K 14/415

(52) U.S. Cl. CPC C12N 15/8261; C12N 9/6408; C12N 9/2405; C12Y 302/01014; C07K 14/415; C12Y 305/99007; C12Y 302/01001; C07K 14/32

(57) ABSTRACT

Isolated bioactive priming peptides and bioactive priming compostions comprising bioactive priming polypeptides and/or inducer compounds are provided that are useful when applied to plants in agricultural formulations. Methods of using the isolated bioactive priming peptides and/or compositions are also provided which are applied exogenously to the surface of a plant or a plant cell membrane or endogenously to the interior of a plant or to a plant cell. The isolated bioactive priming peptides and/or bioactive priming compositions when applied to a plant, a plant part, or a plant growth medium or a rhizosphere in an area surrounding the plant or the plant part increase growth, yield, health, longevity, productivity, and/or vigor of a plant or a plant part and/or protect the plant or the plant part from disease, and/or increase the innate immune response of the plant or the plant part and/or improve the quality and/or quantity of juice obtained from a plant or plant part.

### CROSS REFERENCE TO RELATED APPLICATIONS

[0001] This application claims priority to U.S. Provisional Application No. 62/796,010, filed Jan. 23, 2019, the content of which is incorporated herein by reference in its entirety.

### FIELD OF THE INVENTION

[0002] Bioactive priming compositions which can be delivered in agricultural formulations are provided. The compositions comprise polypeptides and/or inducer compounds and can be applied to crops to achieve agronomically desirable outcomes such as enhanced phenotypes in plants (e.g., those that exhibit protection against pests, disease agents and abiotic stress), increased plant growth, productivity and yield. The compositions and methods described herein are particularly suited for improving the health and productivity of citrus, specialty, horticultural, row and vine crops.

### BACKGROUND OF THE INVENTION

[0003] Conventional methods to achieve desired agronomic phenotypes such as increased yield, disease prevention, disease resistance, and improved abiotic stress tolerance have utilized mostly selective breeding, grafting, transgenic and agrochemical approaches.

[0004] Bioactive Priming Polypeptides Involved in Plant Defense Responses

[0005] Plants possess an immune system that detects and protects against microbes that can cause disease. Antimicrobial peptides (AMPs) in plants are often the first line of defense against invading pathogens and are involved in the initiation of defense responses that can impart innate immunity to a plant. Many AMPs are generically active against various kinds of infectious agents. They are generally classified as antibacterial, anti-fungal, anti-viral and/or anti-parasitic.

[0006] The resistance of given plant species against certain pathogenic organisms that can contact a plant surface and colonize it, is based on highly specialized recognition systems for molecules produced only by certain microbes (for example, specific bacterial or fungal strains). Plants sense potential microbial invaders by using pattern-recognition receptors (PRRs) to recognize the pathogen-associated molecular patterns (PAMPs) associated with them.

[0007] Flagellin/Flagellin-Associated Polypeptides

[0008] Flagellins and flagellin-associated polypeptides derived from those flagellins have been reported to have functional roles in innate immune responses in plants. These polypeptides are derived from highly conserved domains of eubacterial flagellin. Flagellin is the main building block of the bacterial flagellum. The flagellin protein subunit building up the filament of bacterial flagellum can act as a potent elicitor in cells to mount defense-related responses in various plant species.

[0009] “Flagellin” is a globular protein that polymerizes to form the whip-like filament structure of of the bacterial flagellum. Flagellin is the principal substituent of bacterial flagellum and is present in flagellated bacteria. Plants can perceive, combat infection and mount defense signaling against bacterial microbes through the recognition of conserved epitopes, such as the stretch of 22 amino acids (Flg22) located in the N-terminus of a full length flagellin coding sequence. The elicitor activity of Flg22 polypeptide is attributed to this conserved domain within the N-terminus of the flagellin protein (Felix et al., 1999). Plants can perceive bacteria through pattern recognition receptors (PRRs) which include leucine-rich repeat receptor kinases located in the plasma membrane and available at the plant cell surface. In plants, Flg22 is recognized by the leucine-rich repeat receptor kinase FLAGELLIN SENSING 2 (FLS2), which is highly conserved in both monocot and dicot plants.

[0010] In Arabidopsis, the innate immune response to Flg22 involves a host recognition protein complex that contains the FLS2 leucine rich repeat (LRR) receptor kinase (Gómez-Gómez L. and Boller T., “FLS2: An LRR receptor-like kinase involved in the perception of the bacterial elicitor flagellin in Arabidopsis,” Molecular Cell 5: 1003-1011, 2000). In Arabidopsis thaliana, FLS2 is a PRR that determines flagellin perception and is specific for the binding of the flagellin-associated polypeptide(s). For example, the binding of Flg22 to the plasma membrane-bound receptor triggers a signaling cascade that is involved in the activation of pattern-triggered immunity (Chinchilla et al., “The Arabidopsis receptor kinase FLS2 binds Flg22 and determines the specificity of flagellin perception,” Plant Cell 18: 465-476, 2006). Thus, the binding of Flg22 to the Arabidopsis FLS2 membrane-bound receptor promotes the first step of activation in which the binding elicits an activation cascade for defense responses in the plant. The Flg22-FLS2 interaction can also lead to the production of reactive oxygen species (ROS) that contribute to the induction of an oxidative burst, cellular medium alkalinization, downstream induction of pathogen-responsive genes and defense-related responses which then can impart disease resistance to a plant (Felix G. et al., “Plants have a sensitive perception system for the most conserved domain of bacterial flagellin,” The Plant Journal 18: 265-276, 1999, Gómez-Gómez L. and Boller T., “FLS2: An LRR receptor-like kinase involved in the perception of the bacterial elicitor flagellin in Arabidopsis,” Molecular Cell 5: 1003-1011, 2000, Meindi et al., “The bacterial elicitor flagellin activates its receptor in tomato cells according to the address-message concept,” The Plant Cell 12: 1783-1794, 2000). In tomato, high affinity binding of Flg22 to a FLS receptor was observed using both intact cells as well as to microsomal membrane preparations. In this study, the binding of Flg22 to the FLS2 receptor(s) at the plasma membrane surface was nonreversible under physiological conditions, which reflects an uptake process of the Flg22 elicitor with import into the tomato cells (Meindi et al., “The bacterial elicitor flagellin activates its receptor in tomato cells according to the address-message concept,” The Plant Cell 12: 1783-1794, 2000). Recognition of Flg22 by FLS2 triggers both local and systemic plant immune responses. The Flg22-bound, activated FLS2 receptor complex is internalized into plant cells by endocytosis and Flg22 is shown to move systemically throughout the plant (Jelenska et al., “Flagellin peptide Flg22 gains access to long-distance trafficking in Arabidopsis via its receptor, FLS2,” Journal of Experimental Botany 68: 1769-1783, 2017), which may contribute towards systemic Flg22 immune responses.

[0011] Flagellin perception involving Flg22 is highly conserved across divergent plant taxa (Taki et al., “Analysis of flagellin perception mediated by Flg22 receptor OsFLS2 in rice,” Molecular Plant Microbe Interactions 21: 1635-1642, 2008). Submicromolar concentrations of synthetic polypeptides comprising between 15-22 or 28 amino acids from conserved domains of a flagellin protein, act as elicitors to initiate defense responses in a variety of plant species.

[0012] Generation of transgenic plants has been used to confirm the flagellin-specific PAMPs that bind to the flagellin-specific PRRs. Ectopic expression of FLS2 in Arabidopsis plants showed a direct correlation between the flagellin responses and FLS2 expression levels, which indicate that FLS2 is involved in the recognition of flagellin (a signal of bacterial presence) and leads to the activation of defense responses in plants (Gómez-Gómez L. and Boller T., “FLS2: An LRR receptor-like kinase involved in the perception of the bacterial elicitor flagellin in Arabidopsis,” Molecular Cell 5: 1003-1011, 2000). Transgenic plants expressing the flagellin binding receptor have shown efficacy against certain pathogens. Flagellin binding to FLS2 was involved in the initiation of expression of specific MAP kinase transcription factors that function downstream of the flagellin receptor FLS2. Mutant plants (fls2) lacking in the FLS2 receptor are insensitive to Flg22 (Gómez-Gómez L. and Boller T., “FLS2: An LRR receptor-like kinase involved in the perception of the bacterial elicitor flagellin in Arabidopsis,” Molecular Cell 5: 1003-1011, 2000), and impaired in Flg22 binding to the FLS2 receptor. Mutant plants (fls2) also exhibited enhanced susceptibility to infection and disease when treated with pathogenic bacteria (Zipfel et al., “Bacterial disease resistance in Arabidopsis through flagellin perception,” Nature 428: 764-767, 2004).

[0013] Traditionally, methods to improve disease resistance have capitalized on these and other such findings and have taken a transgenic approach. Transgenic plants and seeds transformed with a Flagellin-Sensing (FLS) receptor protein (WO2016007606A2 incorporated herein by reference in its entirety) or with transcription factors involved in downstream signaling of FLS (WO2002072782A2 incorporated herein by reference in its entirety) have produced plants that confer disease resistance to certain pathogenic microorganisms. In another example, transgenic plants expressing Flagellin-Sensing (FLS3) receptor also have exhibited enhanced resistance to disease compared to non-transgenic plants not expressing the FLS3 receptor (WO2016007606A2 incorporated herein by reference in its entirety).

[0014] Plant Defensins/Thionins

[0015] Plant defensins are also characterized as anti-microbial peptides (AMPs). Plant defensins contain several conserved cysteinyl residues that form disulfide bridges and contribute to their structural stability. Defensins are among the best characterized cysteine-rich AMPs in plants. Members of the defensin family have four disulfide bridges that fold into a globular structure. This highly conserved structure bestows highly specialized roles in protecting plants against microbial pathogenic organisms (Nawrot et al., “Plant antimicrobial peptides,” Folia Microbiology 59: 181-196, 2014). Thionins are cystine-rich plant AMPs classified in the defensin family and typically comprise 45-48 amino acid residues, in which 6-8 of these amino acids are cysteine that form 3-4 disulfide bonds in higher plants. Thionins have been found to be present in both monocot and dicot plants and their expression can be induced by infection with various microbes (Tam et. al., “Antimicrobial peptides from plants,” Pharmaceuticals 8: 711-757, 2015). Particular amino acids of thionins such as Lys1 and Tyr13, which are highly conserved, have been found to be vital to the functional toxicity of these AMPs.

[0016] Root Hair Promoting Polypeptide (RHPP)

[0017] Root hair promoting polypeptide (RHPP) is a 12 amino acid fragment derived from soybean Kunitz trypsin inhibitor (KTI) protein, which was detected from soybean meal that was subjected to degradation using an alkaline protease from Bacillus circulans HA₁₂ (Matsumiya Y. and Kubo M. “Soybean and Nutrition, Chapter 11: Soybean Peptide: Novel plant growth promoting peptide from soybean,” Agricultural and Biological Sciences, Sheny H. E. (editor), pgs. 215-230, 2011). When applied to soybean roots, RHPP was shown to accumulate in the roots and promote root growth through the stimulation of cell division and root hair differentiation in Brassica.

[0018] Citrus Greening and Other Citrus Diseases

[0019] Asian citrus greening disease is transmitted by the Asian citrus psyllid, Diaphorina citri or the two-spotted citrus psyllid, Trioza erytreae Del Guercio, which are both characterized as sap-sucking, hemipteran bug(s) in the family Psyllidae and have been implicated in the spread of citrus greening, a disease caused by a highly fastidious phloem-inhabiting bacteria, Candidatus Liberibacter asiaticus (Halbert, S. E. and Manjunath, K. L, “Asian citrus psyllids Sternorrhyncha: Psyllidae and greening disease of citrus: A literature review and assessment of risk in Florida,” Florida Entomologist 87: 330-353, 2004). Three separate species of the bacteria have been identified to cause HLB disease in citrus plants with Candidatus Liberbacter asiaticus (CLas) the most widespread in North America and responsible for the disease in Florida (Gottwald, TR., “Current epidemiological understanding of citrus Huanglongbing”, Annual Review of Phytopathology 48: 119-139, 2010).

[0020] Liberbacter infection in citrus trees is accompanied by callose deposition in the plasmodesmata pore units that connect the companion cells and sieve elements. This callose accumulation was shown to result in the impairment of movement or transport through the phloem in infected trees resulting in a delay in photoassimilate export in Liberibacter infected leaves (Koh et. al., “Callose deposition in the phloem plasmodesmata and inhibition of phloem transport in citrus leaves infected with Candidatus Liberibacter asiaticus” Protoplasma 249: 687-697, 2012). The symptoms of HLB disease include vein yellowing and an asymmetrical chlorosis of leaves termed blotchy mottle that occur as the bacteria clogs up the vascular system and is the most diagnostic symptom of the disease. Early symptoms of yellowing may appear on a single shoot or branch and with disease progression, the yellowing can spread over the entire tree. Infected trees are stunted and sparsely foliated and can have root loss. Overall tree appearance for citrus trees infected with HLB may exhibit yellow shoots with upright narrow leaves, shoot die back, sparse foliation, a thin canopy, stunting, off-season bloom, or an overall yellow appearance.

[0021] As HLB continues to infect a tree, there is the spread of yellow leaves, vein corking and green islands on the leaves. Fruit can show signs of HLB infection both inside and out. On the outside, fruits may be lopsided or oblong in shape, they may be smaller than normal fruits, and they may change color abnormally turning orange near the stem and staying green at the blossom end. Fruit of afflicted trees are often few in number, small, deformed (malformed) or lopsided and fail to color properly (discolored), remaining green at the end and display a yellow stain just beneath the peduncle (stem) on a cut fruit. HLB-diseased trees also produce fruit with aborted seeds. The fruit of diseased trees may be green, drop prematurely from the tree and have a low soluble acid content accompanied by a bitter taste, root loss and eventually tree death (International Research Conference on Huanglongbing; Proceedings of the Meeting 2009 Plant Management Network).

[0022] To date, there is no effective treatment for trees infected with HLB. Infected trees overtime become unproductive and are usually destroyed to minimize further spread of the bacteria. HLB disease is considered fatal for a citrus tree once the tree becomes infected. All commercially available citrus varieties are susceptible to HLB. Therefore, the demand for new treatments and methods of disease control for HLB is necessary.

[0023] HLB disease may also be graft transmitted when citrus rootstocks are selected for and grafted to scion varieties. Management of citrus greening disease has proven difficult and therefore current methods for control of HLB have taken a multi-tiered integrated disease and pest management approach using 1) the implementation of disease-free nursery stock and rootstock used in grafting, 2) the use of pesticides and systemic insecticides to control the psyllid vector, 3) the use of biological control agents such as antibiotics, 4) the use of beneficial insects, such as parasitic wasps that attack the psyllid, and 5) breeding for new citrus germplasm with increased resistance to the citrus greening causing bacteria (Candidatus Liberibacter spp.). The use of cultural and regulatory measures to prevent the spread of the disease is also part of the integrated management approach. Many aspects involved in the management of citrus greening are costly both monetarily and in respect to losses in citrus production.

[0024] Tissue sectioning of CLas-infected leaves and stems revealed increased deposition of callose and starch within the plant vasculature (Koh et al., “Callose deposition in the phloem plasmodesmata and inhibition of phloem transport in citrus leaves infected with “Candidatus Liberibacter asiaticus” Protoplasma 249: 687-697, 2012). The devastating symptoms of Citrus Greening Disease or HLB are likely caused in part by a blockage of the plant vasculature with callose, resulting in a failure to move photosynthates through the plant (from source leaves to sink tissues, such as fruit).

[0025] Those of skill in the art are able to test for infection by Ca. Liberibacter to identify which plants are infected with the bacteria. Treatment of such infected citrus plants using treatments that comprise a flagellin peptide (Flg22) or an antibiotic (oxytetracycline) provided in combination with inducer compounds and recovery mixtures and methods that use the compositions and mixture to prevent and treat HLB are provided herein.

[0026] In addition to HLB disease, other plant pathogens of citrus include the bacterium Xanthomonas citri causing citrus canker, Xanthomonas axonopodis pv. citrumelo causing citrus bacterial spot disease, and Xylellafastidiosa causing citrus variegated chlorosis; the pathogenic fungus Alternaria citri causing leaf and stem rot and spot, Phytophthora spp. causing serious and soil-borne diseases such as foot and root rot, and Guignardia citricarpa causing citrus black spot, all of which can result in economic crop loss, juice and fruit quality. Effective methods and compositions to treat these and other citrus plant pathogens are urgently needed.

### SUMMARY OF THE INVENTION

[0027] A composition is provided for bioactive priming of a plant or a plant part to increase growth, yield, health, longevity, productivity, and/or vigor of a plant or a plant part and/or protect the plant or the plant part from disease, and/or increase the innate immune response of the plant or the plant part. The composition comprises (A) at least one bioactive priming polypeptide and at least one inducer compound or (B) at least two bioactive priming polypeptides, optionally with at least one inducer compound; or (C) a callose synthase inhibitor and at least one inducer compound comprising a bacteriocide, an amino acid, a substituted or unsubstituted benzoic acid or derivative or salt thereof, a dicarboxylic acid or derivative or salt thereof, a betaine, a proline, a benzothiadiazole, or any combination thereof; or (D) a bacteriocide and at least one inducer compound comprising β-amino butyric acid (BABA), a betaine, a proline, a benzothiadiazole, salicylic acid, oxalic acid, or any combination thereof; wherein:

[0028] the bioactive priming polypeptide or polypeptides of (A) or (B) comprise:

[0029] (i) a flagellin or flagellin-associated polypeptide; or

[0030] (ii) a retro inverso flagellin or flagellin-associated polypeptide

[0031] (iii) a root hair promoting polypeptide (RHPP); or

[0032] (iv) a retro inverso root hair promoting polypeptide (RI RHPP); or

[0033] (v) a thionin or thionin-like polypeptide; or

[0034] (vi) a glucanase polypeptide; or

[0035] (vii) a serine protease polypeptide; or

[0036] (viii) an ACC deaminase polypeptide; or

[0037] (ix) an amylase; or

[0038] (x) a chitinase; or

[0039] (xi) any combination thereof;

[0040] with the provisos that:

[0041] the inducer compound comprises a callose synthase inhibitor, β-amino butyric acid (BABA), a betaine, a proline, salicylic acid, oxalic acid, a benzothiadiazole, or any combination thereof when the polypeptide of (A) comprises any polypeptide from groups (i) to (iv) but not polypeptides selected from the groups (v) to (x); and

[0042] the inducer compound comprises a bacteriocide, an amino acid or isomer thereof, a callose synthase inhibitor, a substituted or unsubstituted benzoic acid or derivative thereof, a dicarboxylic acid or derivative thereof, a betaine, a proline, a benzothiadiazole, or any combination thereof when the polypeptide of (A) comprises any polypeptide from groups (v) to (x);

[0043] and the composition comprises the inducer compound and the inducer compound comprises a callose synthase inhibitor, β-amino butyric acid (BABA), a betaine, proline, salicyclic acid, oxalic acid, a benzothiadiazole, or any combination thereof when the two or more polypeptides of (B) comprise polypeptides selected from groups (i)-(iv) but not polypeptides selected from the groups (v) to (x).

[0044] Another composition is provided for bioactive priming of a plant or a plant part to increase growth, yield, health, longevity, productivity, and/or vigor of a plant or a plant part and/or protect the plant or the plant part from disease, and/or increase the innate immune response of the plant or the plant part and/or improve the quality of a fruit, juice obtained from a fruit, or a harvest obtained from a plant or plant part, wherein the composition comprises bixafen and at least one free polypeptide comprising

[0045] (i) a flagellin or flagellin-associated polypeptide; or

[0046] (ii) a retro inverso flagellin or flagellin-associated polypeptide

[0047] (iii) a root hair promoting polypeptide (RHPP); or

[0048] (iv) a retro inverso root hair promoting polypeptide (RI RHPP); or

[0049] (v) a thionin or thionin-like polypeptide; or

[0050] (vi) a glucanase polypeptide; or

[0051] (vii) a serine protease polypeptide; or

[0052] (viii) an ACC deaminase (1-aminocyclopropane-1-carboxylate deaminase) polypeptide; or

[0053] (ix) an amylase; or

[0054] (x) a chitinase; or

[0055] (xi) any combination thereof;

wherein the free polypeptide is not bound to an exosporium of a Bacillus cereus family member or an intact Bacillus cereus family member spore.

[0056] An isolated peptide for bioactive priming of a plant or a plant part is provided, to increase growth, yield, health, longevity, productivity, and/or vigor of a plant or a plant part and/or decrease abiotic stress in the plant or plant part and/or protect the plant or the plant part from disease, insects and/or nematodes and/or increase the innate immune response of the plant or the plant part and/or change plant architecture, wherein the peptide comprises the amino acid sequence of any one of SEQ ID NOs: 732, 735, 746-755 and 757-778, or the peptide consists of the amino acid sequence of any one of SEQ ID NOs: 732, 735, and 745-778.

[0057] A method is provided for increasing growth, yield, health, longevity, productivity, and/or vigor of a plant or plant part and/or protecting the plant or plant part from disease and/or increase the innate immune response of the plant or the plant part, the method comprising applying a composition or an isolated polypeptide to a plant, plant part, or a plant growth medium in which the plant or plant part will be grown, or a rhizosphere in an area surrounding the plant or the plant part to increase growth, yield, health, longevity, productivity, and/or vigor of the plant or plant part and/or protect the plant or the plant part from disease and/or increase the innate immune response of the plant or plant part wherein the isolated polypeptide comprises: a β-1,3 glucanase and the β-1,3 glucanase is injected into the trunk of the citrus plant; or an amino acid sequence of the isolated polypeptide comprises any one of SEQ ID NOs: 732, 735, 746-755 and 757-778, or consists of any one of SEQ ID NOs: 732, 735, and 745-778; and the composition comprises a β-1,3 glucanase, or bixafen and at least one free polypeptide or (A) at least one bioactive priming polypeptide and at least one inducer compound or (B) at least two bioactive priming polypeptides, optionally with at least one inducer compound; or (C) a callose synthase inhibitor and at least one inducer compound comprising a bacteriocide, an amino acid, a substituted or unsubstituted benzoic acid or derivative or salt thereof, a dicarboxylic acid or derivative or salt thereof, a betaine, a proline, a benzothiadiazole, a or any combination thereof; or (D) a bacteriocide and at least one inducer compound comprising β-amino butyric acid (BABA), a betaine, a proline, a benzothiadiazole, salicylic acid, oxalic acid, or any combination thereof; wherein:
[0058] the bioactive priming polypeptide or polypeptides of (A) or (B) or the free polypeptide comprise:
[0059] (i) a flagellin or flagellin-associated polypeptide; or
[0060] (ii) a retro inverso flagellin or flagellin-associated polypeptide
[0061] (iii) a root hair promoting polypeptide (RHPP); or
[0062] (iv) a retro inverso root hair promoting polypeptide (RI RHPP); or
[0063] (v) a thionin or thionin-like polypeptide; or
[0064] (vi) a glucanase polypeptide; or
[0065] (vii) a serine protease polypeptide; or
[0066] (viii) an ACC deaminase polypeptide; or
[0067] (ix) an amylase; or
[0068] (x) a chitinase; or
[0069] (xi) any combination thereof;
[0070] with the provisos that:
[0071] the inducer compound comprises a callose synthase inhibitor, β-amino butyric acid (BABA), a betaine, a proline, salicylic acid, oxalic acid, a benzothiadiazole or any combination thereof when the polypeptide of (A) comprises any polypeptide from groups (i)-(v) but not polypeptides selected from the groups (vi) to (x); and
[0072] the inducer compound comprises a bacteriocide, an amino acid or isomer thereof, a callose synthase inhibitor, a substituted or unsubstituted benzoic acid or derivative thereof, a dicarboxylic acid or derivative thereof, a betaine, a proline, a benzothiadiazole, or any combination thereof when the polypeptide of (A) comprises any polypeptide from groups (vi) to (x); and
[0073] the composition comprises the inducer compound and the inducer compound comprises a callose synthase inhibitor, β-amino butyric acid (BABA), a betaine, proline, salicyclic acid, oxalic acid, a benzothiadiazole, or any combination thereof when the two or more polypeptides of (B) comprise polypeptides selected from groups (i)-(v) but not polypeptides selected from the groups (vi) to (x).

[0074] Another method is provided for increasing juice content and/or improving juice, sugar or acid content or improving a Brix:acid ratio of juice obtained from a plant, the method comprising applying a composition or an isolated polypeptide to the plant or plant part, or plant growth medium in which the plant will be grown, or a rhizosphere in an area surrounding the plant or plant part to increase juice content and/or improving juice, sugar or acid content or improve a Brix:acid ratio of juice obtained from the plant or plant part, the isolated polypeptide comprises a β-1,3 glucanase and the β-1,3 glucanase is injected into the trunk of the citrus plant; or an amino acid sequence of the isolated polypeptide comprises any one of SEQ ID NOs: 732, 735, 746-755 and 757-778, or consists of any one of SEQ ID NOs: 732, 735, and 745-778 and the composition comprising β-1,3-glucanase, bixafen and at least one free polypeptide, or (A) at least one polypeptide and an inducer compound; (B) at least two polypeptides, optionally, with an inducer compound; (C) a callose synthase inhibitor and at least one of an inducer compound comprising a bacteriocide, an amino acid or isomer thereof, a substituted or unsubstituted benzoic acid or derivative or salt thereof, a dicarboxylic acid or derivative or salt thereof, a benzothiadiazole, a betaine, a proline, or any combination thereof; or (D) a bacteriocide and at least one of an inducer compound comprising an amino acid or isomer thereof, a substituted or unsubstituted benzoic acid or derivative or salt thereof, a dicarboxylic acid or derivative or salt thereof, a benzothiadiazole, a betaine, a proline, or any combination thereof; wherein: the polypeptide or polypeptides of (A) or (B) or the free polypeptide comprise:

[0075] (i) a flagellin or flagellin-associated polypeptide; or

[0076] (ii) a retro inverso flagellin or flagellin-associated polypeptide

[0077] (iii) a root hair promoting polypeptide (RHPP); or

[0078] (iv) a retro inverso root hair promoting polypeptide (RI RHPP); or

[0079] (v) a thionin or thionin-like polypeptide; or

[0080] (vi) a glucanase polypeptide; or

[0081] (vii) a serine protease polypeptide; or

[0082] (viii) an ACC deaminase polypeptide; or

[0083] (ix) an amylase; or

[0084] (x) a chitinase; or

[0085] (ix) any combination thereof;

[0086] The features of the invention are further defined in the appended claims. Other objects and features will be in part apparent and in part pointed out hereinafter.

### BRIEF DESCRIPTION OF THE DRAWINGS

[0087] FIG. 1 shows the Bt.4Q7Flg22 bioactive priming polypeptide in its native L configuration (SEQ ID NO: 226) and the corresponding retro inverso or D configuration form (SEQ ID NO: 375).

### DEFINITIONS

[0088] When the articles “a,” “an,” “one,” “the,” and “said” are used herein, they mean “at least one” or “one or more” unless otherwise indicated.

[0089] The terms “comprising,” “including,” and “having” are intended to be inclusive and mean that there may be additional elements other than the listed elements.

[0090] “Abiotic stress” as used herein is defined as an environmental condition that can have a negative impact on a plant. Abiotic stress can include: temperature (high or low) stress, radiation stress (visible or UV), drought stress, cold stress, salt stress, osmotic stress, nutrient-deficient or high metal stress, or water stress that results in water deficit, flooding or anoxia. Other abiotic stress factors include dehydration, wounding, ozone, and high or low humidity.

[0091] “Bioactive priming” refers to an effect of the polypeptides and/or compositions as described herein to improve a plant or a plant part. Bioactive priming can increase growth, yield, quality, health, longevity, productivity, and/or vigor of a plant or a plant part and/or decrease abiotic stress in the plant or the plant part and/or protect the plant or the plant part from disease, insects and/or nematodes, and/or increase the innate immune response of the plant or the plant part and/or change plant architecture. Bioactive priming can be used to protect a plant or plant part from cosmetic damage due to bacterial or fungal growth on the surface of the plant or plant part or remove/cleanse bacteria and/or fungi from the surface of a plant or plant part. Bioactive priming can also improve the quality and/or quantity of a product obtained from a plant. For example, bioactive priming can improve juice quality or quantity obtained from a citrus plant.

[0092] A “bioactive priming polypeptide” as used herein may be used interchangeably with the term “priming agent(s)” and as described for the classes of polypeptides of the: flagellin and flagellin-associated polypeptides, thionins, root hair promoting polypeptide (RHPP), serine proteases, glucanases, and ACC deaminases as well as any retro inverso polypeptides thereof.

[0093] A “colorant” as used herein acts as a visual product identifier for product branding and application. Colorants can include, but are not limited to, dyes and pigments, inorganic pigments, organic pigments, polymeric colorants, and formulated pigment coating dispersions available in a variety of highly concentrated shades.

[0094] “Endogenously” applied as used herein refers to an application to the inside of a plant surface. Small bioactive priming polypeptides are particularly suited for signalling and communication within a plant. Inside a plant surface refers to a surface internal to any plant membrane or plant cell. Internal could be used to mean either extracellular or intracellular to a plant cell and is inclusive of xylem, phloem, tracheids, etc. Endogenous can refer to movement systemically or through a plant such as referring to cell to cell movement in a plant. Endogenous application can include delivery of bioactive priming polypeptides using recombinant endophytic bacteria or fungi, wherein the endophytic microorganism is delivered externally to the plant and through natural mechanisms moves internally to the plant.

[0095] “Exogenously” applied as used herein refers to an application to the outside of a plant surface. A plant surface can be any external plant surface, for example a plasma membrane, a cuticle, a trichome, a leaf, a root hair, seed coat, etc.

[0096] “-associated” or “-like” polypeptides as used herein refers to polypeptides derived from or structurally similar to the recited polypeptide but having an amino acid sequence and/or source distinct from the recited polypeptide. For example, the thionin-like protein from Brassica rapa (SEQ ID NO: 664) has a different sequence than thionin from Brassica napus (SEQ ID NO: 663) but is structurally and functionally similar.

[0097] A “foliar treatment” as used herein refers to a composition that is applied to the above ground parts or foliage of a plant or plant part and may have leaves, stems, flowers, branches, or any aerial plant part, for example, scion.

[0098] A “free polypeptide” as used herein refers to a peptide, polypeptide or protein (e.g., an enzyme) that is substantially free of intact cells. The term “free polypeptide” includes, but is not limited to, crude cell extracts containing a polypeptide, a partially purified, a substantially purified, or a purified polypeptide. Free polypeptides can optionally be immobilized on a chemical matrix or support to allow for controlled release of the polypeptide. Free polypeptide preparations preferably do not include polypeptides bound to an exosporium of a Bacillus cereus family member. Free polypeptides also preferably do not include polypeptides bound to exosporium of an intact Bacillus cereus family member spore.

[0099] “Injection” as described herein can be used interchangeably with vaccination or immunization and provides a process whereby the bioactive priming polypeptides are delivered endogenously to a plant or plant part.

[0100] “Inoculation” means to deliver-bacteria or living microorganisms that produce the priming polypeptide to a plant or plant part. Inoculation can also refer to the delivery of the priming polypeptide for passive entry through the stomata or any opening in or on a plant or plant part.

[0101] A “plant” refers to but is not limited to a monocot plant, a dicot plant, or a gymnosperm plant. The term “plant” as used herein includes whole plants, plant organs, progeny of whole plants or plant organs, embryos, somatic embryos, embryo-like structures, protocorms, protocorm-like bodies, and suspensions of plant cells. Plant organs comprise shoot vegetative organs/structures (e.g., leaves, stems and tubers), roots, flowers and floral organs/structures (e.g., bracts, sepals, petals, stamens, carpels, anthers and ovules), seed including embryo, endosperm, and seed coat and fruit (the mature ovary), plant tissue (e.g., phloem tissue, xylem tissue, vascular tissue, ground tissue, and the like) and cells (e.g., guard cells, egg cells, trichomes and the like). The class of plants that can be used in the methods described herein is generally as broad as the class of higher plants, specifically angio-sperms monocotyledonous (monocots) and dicotyledonous (dicots) plants and gymnosperms. It includes plants of a variety of ploidy levels, including aneuploid, polyploid, diploid, haploid, homozygous and hemizygous. The plants described herein can be monocot crops, such as, sorghum, maize, wheat, rice, barley, oats, rye, millet, and triticale. The plants described herein can also be dicot crops, such as apple, pear, peach, plum, orange, lemon, lime, grapefruit, kiwi, pomegranate, olive, peanut, tobacco, tomato, etc. Also, the plants can be horticultural plants such as rose, marigold, primrose, dogwood, pansy, geranium, etc. Also, the plant can be a citrus plant or a row crop. Other suitable plants are discussed in more detail in the specification below.

[0102] A plant “biostimulant” is any substance or microorganism applied to a plant or a plant part that is used to enhance nutrition efficiency, abiotic stress tolerance and/or any other plant quality trait(s).

[0103] A “plant cell” as used herein refers to any plant cell and can comprise a cell at the plant surface or internal to the plant plasma membrane, for example, an epidermal cell, a trichome cell, a xylem cell, a phloem cell, a sieve tube element, or a companion cell.

[0104] A “plant part” as described herein refers to a plant cell, a plant tissue (e.g., phloem tissue, xylem tissue, vascular tissue, ground tissue, and the like), a plant system (e.g., the vascular system), a leaf, a stem, a flower, a floral organ, a fruit, pollen, a vegetable, a tuber, a corm, a bulb, a pseudobulb, a pod, a root, a rhizome, a root ball, a root stock, a scion, or a seed.

[0105] A “polypeptide” as described herein refers to any protein, peptide or polypeptide. The polypeptide can comprise or consist of 100 amino acids or fewer, 90 amino acids or fewer, 80 amino acids or fewer, 70 amino acids or fewer, 60 amino acids or fewer, 50 amino acids or fewer, or 40 amino acids or fewer. The polypeptide can comprise or consist of 6 or more amino acids, 7 or more amino acids, 8 or more amino acids, 9 or more amino acids, or 10 or more amino acids. For example, the polypeptide can comprise or consist of from 6 to 50 amino acids, from 6 to 40 amino acids, from 6 to 35 amino acids, from 6 to 30 amino acids, from 7 to 30 amino acids, from 8 to 30 amino acids, from 9 to 30 amino acids, from 10 to 30 or from 15 to 30 amino acids. The polypeptide can comprise or consist of about 6, about 7, about 8, about 9, about 10, about 11, about 12, about 13, about 14, about 15, about 16, about 17, about 18, about 19, about 20, about 21, about 22, about 23, about 24, about 25, about 26, about 27, about 28, about 29, or about 30 amino acids.

[0106] Alternatively, the polypeptide can comprise a full-length protein and comprise or consist of from about 100 to about 500 amino acids, from about 100 to 400 amino acids, from about 200 to about 400 amino acids, from about 300 to about 500 amino acids, from about 300 to about 350 amino acids, from about 350 to 400 amino acids, from about 400 to 450 amino acids amino acids, from about 300 to about 310 amino acids, from about 320 to about 330 amino acids, from about 330 to about 340 amino acids, from about 340 to about 350 amino acids, from about 350 to about 360 amino acids, from about 360 to about 370 amino acids, from about 370 to about 380 amino acids, from about 380 to about 390 amino acids, from about 390 to about 400 amino acids, from about 400 to about 410 amino acids, from about 410 to about 420 amino acids, from about 420 to about 430 amino acids, from about 430 to about 440 amino acids, or from about 440 to about 450 amino acids.

[0107] “Priming” or “peptide priming” as used herein refers to a technique used to improve plant performance. In particular priming is a process whereby the bioactive priming polypeptides are applied either exogenously or endogenously to a plant, plant part, plant cell or to the intercellular space of a plant that results in outcomes that provide benefits to a plant, such as enhanced growth, productivity, abiotic stress tolerance, pest and disease tolerance or prevention.

[0108] A “retro-inverso” polypeptide as used herein refers to a polypeptide chain of a natural derived polypeptide from a normal-all-L chain reconfigured and built using non-naturally occurring D-amino acids in reverse order of the naturally occurring L-amino acids. The all-D-amino acid form and the parent chain containing all L-form are topological mirrorings of the protein structure.

[0109] A “seed treatment” as used herein refers to a substance or composition that is used to treat or coat a seed. Sample seed treatments include an application of biological organisms, chemical ingredients, inoculants, herbicide safeners, micronutrients, plant growth regulators, seed coatings, etc. provided to a seed to suppress, control or repel plant pathogens, insects, or other pests that attack seeds, seedlings or plants or any useful agent to promote plant growth and health.

[0110] A “synergistic” effect refers to an effect arising between the interaction or cooperation of two or more bioactive priming polypeptides, substances, compounds, or other agents to produce a combined effect greater than the sum of their separate effects.

[0111] A “synergistic effective concentration” refers to the concentration(s) of two or more bioactive priming polypeptides, substances, compounds or other agents that produces an effect greater than the sum of the individual effects.

[0112] The term “Citrus” or “citrus”, as used herein refers to any plant of the genus Citrus, family Ruttaceae, and include, but are not limited to: Sweet orange also known as Hamlin or Valencia orange (Citrus sinensis, Citrus maxima x Citrus reticulata), Bergamot Orange (Citrus bergamia, Citrus limetta x Citrus aurantium), Bitter Orange, Sour Orange, or Seville Orange (Citrus aurantium, Citrus maxima x Citrus reticulata), Blood Orange (Citrus sinensis), Orangelo or Chironja (Citrus paradisi x Citrus sinensis), Mandarin Orange (Citrus reticulate), Trifoliate Orange (Citrus trifoliata), Tachibana Orange (Citrus tachibana), Alemow (Citrus macrophylla), Clementine (Citrus clementina), Cherry Orange (Citrus kinokuni), Lemon (Citrus limon, or hybrids with Citrus maxima x Citrus medica) or Citrus limonia, Indian Wild Orange (Citrus indica), Imperial Lemon (Citrus limon, Citrus medica x Citrus paradisi), Lime (Citrus latifoli, Citrus aurantifolia), Meyer Lemon (Citrus meyeri); hybrids of Citrus x meyeri with Citrus maxima, Citrus medica, Citrus paradisi and/or Citrus sinensis), Rough Lemon (Citrus jambhiri), Volkamer Lemon (Citrus volkameriana), Ponderosa Lemon (Citrus limon x Citrus medica), Key Lime (Citrus aurantiifolia), Kaffir Lime (Citrus hystrix or Mauritius papeda), Sweet Lemon, Sweet Lime, or Mosambi (Citrus limetta), Persian Lime or Tahiti Lime (Citrus latifolia), Palestine Sweet Lime (Citrus limettioides), Winged Lime (Citrus longispina), Australian Finger Lime (Citrus australasica), Australian Round Lime (Citrus australis), Australian Desert or Outback Lime (Citrus glauca), Mount White Lime (Citrus garrawayae), Jambola (Citrus grandis), Kakadu Lime or Humpty Doo Lime (Citrus gracilis), Russel River Lime (Citrus inodora), New Guinea Wild Lime (Citrus warburgiana), Brown River Finger Lime (Citrus wintersii), Mandarin Lime (Citrus limonia; (hybrids with Citrus reticulata x Citrus maxima x Citrus medica), Carabao Lime (Citrus pennivesiculata), Blood Lime (Citrus australasica x Citrus limonia) Limeberry (Triphasia brassii, Triphasia grandifolia, Triphasia trifolia), Lemon hybrid or Lumia (Citrus medica x Citrus limon), Omani Lime (Citrus aurantiifolia, Citrus medica x Citrus micrantha), Sour Lime or Nimbuka (Citrus acida), Grapefruit (Citrus paradisi; Citrus maxima x Citrus x sinensis), Tangarine (Citrus tangerina), Tangelo (Citrus tangelo; Citrus reticulata x Citrus maxima or Citrus paradisi), Minneola Tangelo (Citrus reticulata x Citrus paradisi), Orangelo (Citrus paradisi x Citrus sinensis), Tangor (Citrus nobilis; Citrus reticulata x Citrus sinensis), Pummelo or Pomelo (Citrus maxima or Citrus retkulata), Citron (Citrus medica), Mountain Citron (Citrus halimii), Kumquat (Citrus japonica or Fortunella species), Kumquat hybrids (Calamondin, Fortunella japonica; Citranqequat, Citrus ichangensis; Limequat, Citrofortunella floridana; Orangequat, hybrid between Satsuma mandarin x Citrus japonica or Fortunella species; Procimequat, Fortunella hirdsiie; Sunquat, hybrid between Citrus meyeri and Citrus japonica or Fortunella species; Yuzuquat, hybrid between Citrus ichangensis and Fortunella margarita), Papedas (Citrus halimii, Citrus indica, Citrus macroptera, Citrus micrantha), Ichang Papeda (Citrus ichangensis), Celebes Papeda (Citrus celebica), Khasi Papeda (Citrus latipes), Melanesian Papeda (Citrus macroptera), Ichang Lemon (Citrus ichangensis x Citrus maxima), Yuzu (Citrus ichangensis x Citrus reticulata), Cam sành (Citrus reticulata x Citrus maxima), Kabosu (Citrus sphaerocarpa), Sudachi (Citrus sudachi), Alemow (Citrus macrophylla), Biasong (Citrus micrantha), Samuyao (Citrus micrantha), Kalpi (Citrus webberi), Mikan (Citrus unshiu), Hyuganatsu (Citrus tamurana), Manyshanyegan (Citrus mangshanensis), Lush (Citrus crenatifolia), Amanatsu or Natsumikan (Citrus natsudaidai), Kinnow (Citrus nobilis x Citrus deliciosa), Kiyomi (Citrus sinensis x Citrus unshiu), Oroblanco (Citrus maxima x Citrus paradisi), Ugh (Citrus reticulata x Citrus maxima and/or Citrus x paradisi), Calamondin (Citrus reticulata x Citrus japonica), Chinotto (Citrus myrtifoha, Citrus aurantium or Citrus pumila), Cleopatra Mandarin (Citrus reshni), Daidai (Citrus aurantium or Citrus daidai), Laraha (Citrus aurantium), Satsuma (Citrus unshiu), Naartjie (Citrus reticulata x Citrus nobilis), Rangpur (Citrus limonia; or hybrid with Citrus sinensis x Citrus maxima x Citrus reticulata), Djeruk Limau (Citrus amblycarpa), Iyokan, anadomikan (Citrus iyo), Odichukuthi (Citrus odichukuthi), Ougonkan (Citrus flaviculpus), Pompia (Citrus monstruosa), Tangerine (Citrus tangerine), Taiwan Tangerine (Citrus depressa), Shonan gold (Citrus flaviculpus or Citrus unshiu), Sunki (Citrus sunki), Mangshanyen (Citrus mangshanensis, Citrus nobilis), Clymenia (Clymenia platypoda, Clymenia polyandra), Jabara (Citrus jabara), Mandora (Mandora cyprus), Melogold (Citrus grandis x Citrus paradisii/Citrus maxima/Citrus grandis), Shangjuan (Citrus ichangensis x Citrus maxima), Nanfengmiju (Citrus reticulata), and Shīkwāsaī (Citrus depressa).

[0113] The term “Huanglongbing,” “Huanglongbing disease,” or “HLB,” as used herein, refers to a disease of plants caused by microorganisms of the Candidatus genus Liberibacter, such as L. asiaticus, L. africanus, and L. americanus. This disease, for example, can be found in citrus plants, or other plants in the genus Rutaceae. Symptoms of Huanglongbing disease include one or more of yellow shoots and mottling of the plant leaves, occasionally with thickening of the leaves, reduced fruit size, fruit greening, premature dropping of fruit from the plant, low fruit soluble acid content, fruit with a bitter or salty taste, or death of the plant.

[0114] The term “treating” or “treatment,” or its cognates, as used herein indicates any process or method which prevents, cures, diminishes, reduces, ameliorates, or slows the progression of a disease. Treatment can include reducing pathogen titer in plant tissue or the appearance of disease symptoms relative to controls which have not undergone treatment. Treatment can also be prophylactic (e.g., by preventing or delaying an infection in a plant).

[0115] The term “reduction of disease symptoms,” as used herein, refers to a measurable decrease in the number or severity of disease symptoms.

[0116] The term “treatment application,” as used herein, refers to any treatment that includes an injection treatment, such as the injection into a trunk of a tree or a plant part, any application to the foliage of a plant or the soil that a plant is growing in and any application to a seed of a plant or the area surrounding the seed of a plant.

[0117] As used herein, “cysteine” can comprise analogs, acids or salts of cysteine. Cysteine is a thiol-containing amino acid in the form of L-cysteine, D-cysteine, DL-cysteine, analogs of L-cysteine comprising: DL homocysteine, L-cysteine methyl ester, L-cysteine ethyl ester, N-carbamoyl cysteine, N-acetylcysteine, L-cysteine sodium salt, L-cysteine monosodium salt L-cysteine disodium salt, L-cysteine monohydrochloride, L-cysteine hydrochloride, L-cysteine ethyl ester hydrochloride, L-cysteine methyl ester hydrochloride, others selenocysteine, seleno-DL-cysteine, N-isobutyryl-L-cysteine, N-isobutyryl-L-cysteine or an acid of cysteine such as cysteine sulfinic acid.

[0118] As used herein, “betaine” refers to any betaine, betaine homolog, or betaine analog. The betaine can comprise glycine betaine, glycine betaine aldehyde, β-alanine betaine, betaine hydrochloride, cetyl betaine, proline betaine, choline-O-sulfate betaine, cocaamidopropyl betaine, oleyl betaine, sulfobetaine, lauryl betaine, octyl betaine, caprylamidopropyl betaine, lauramidopropyl betaine, isostearamidopropyl betaine, or a combination, homolog, or analog of any thereof. For example, the betaine can comprise glycine betaine, glycine betaine aldehyde, β-alanine betaine, betaine hydrochloride, cetyl betaine, choline-O-sulfate betaine, cocaamidopropyl betaine, oleyl betaine, sulfobetaine, lauryl betaine, octyl betaine, caprylamidopropyl betaine, lauramidopropyl betaine, isostearamidopropyl betaine, or a combination, homolog, or analog of any thereof. The betaine can be derived from a plant source such as wheat (e.g., wheat germ or wheat bran) or a plant of the genus Beta (e.g., Beta vulgaris (beet)). The betaine homolog or analog can comprise ectoine, choline, phosphatidylcholine, acetylcholine, cytidine disphosphate choline, dimethylethanolamine, choline chloride, choline salicylate, glycerophosphocholine, phosphocholine, a sphingomyelin, choline bitartrate, propio betaine, deanol betaine, homodeanol betaine, homoglycerol betaine, diethanol homobetaine, triethanol homobetaine, or a combination of any thereof.

[0119] As used herein, “proline” refers to any proline, proline homolog or proline analog. The proline can comprise L-proline, D-proline, hydroxyproline, hydroxyproline derivatives, proline betaine, or a combination, derivative, homolog, or analog of any thereof. The proline homolog or analog can comprise α-methyl-L-proline, α-benzyl-Lproline, trans-4-hydroxy-L-proline, cis-4-hydroxy-L-proline, trans-3-hydroxy-L-proline, cis-3-hydroxy-L-proline, trans-4-amino-L-proline, 3,4-dehydro-α-proline, (2S)-aziridine-2-carboxylic acid, (2S)-azetidine-2-carboxylic acid, L-pipecolic acid, proline betaine, 4-oxo-L-proline, thiazolidine-2-carboxylic acid, (4R)-thiazolidine-4-carboxylic acid, or a combination of any thereof. As used herein, the term “inducer compound” is any compound or substance that acts synergistically with another substance to improve the overall effect either substance would have on a plant or plant part alone. For example, an inducer compound can improve the bioactive priming ability of a bioactive priming polypeptide. Alternatively, two or more inducer compounds can be used in the absence of a polypeptide to exert a synergistic beneficial effect on the plant or plant part. The “beneficial effect” improved by the presence of the inducer can be measured by an increase in growth, yield, health, longevity, productivity, and/or vigor of a plant or a plant part and/or by an improvement in disease symptoms or in the innate immune response of the plant or plant part.

[0120] As used herein, the term “derivative” refers to any derivative, analog, salt or ester of the compound.

[0121] As used herein, the term “substituted’ refers to a compound having one or more of its carbon atoms or one or more hydrogen atoms bound to a carbon atom replaced with a heteroatom or other group, such as hydroxyl (—OH), alkylthio, phosphino, amido (—CON(R_{A})R_{B}), wherein R_{A} and R_{B} are independently hydrogen, alkyl, or aryl), amino (—N(R_{A})(R_{B}), wherein R_{A} and R_{B} are independently hydrogen, alkyl, or aryl), halo (fluoro, chloro, bromo, or iodo), silyl, nitro (—NO₂), an ether (—OR_{A} wherein R_{A} is alkyl or aryl), an ester (—OC(O)R_{A} is alkyl or aryl), or keto (—C(O)R_{A} wherein R_{A} is alkyl or aryl), or heterocyclo. Each substitution can comprise a substituted or unsubstituted alkyl, a substituted or unsubstituted aryl or heteroaryl, or a heteroatom. Suitable substituents include, but are not limited to, lower alkyls (e.g, methyl, ethyl, propyl, butyl), hydroxyls, amines, amides, and benzyls. For example, a “substituted benzoic acid” can comprise a benzoic acid bearing one or more substituents. In an example, one substituent can be a hydroxyl and the substituted benzoic acid can be salicylic acid.

### DESCRIPTION OF THE PREFERRED EMBODIMENTS

[0122] There is a growing need for bioactive compositions that act as “priming agents” to provide benefits to agriculture. The use of bioactive “priming” compositions in agricultural practices provides a paradigm shift for integrated crop management practices for example, to manage disease, abiotic stress and yield programs. Bioactive priming compositions herein can comprise bioactive priming polypeptides (naturally occurring, recombinant or synthetic) and/or an inducer compound. Compositions and methods of using the bioactive priming polypeptides and/or inducer compounds are described to supply a multi-tiered treatment regime to apply to crops to achieve agronomically desirable outcomes. Such desirable outcomes include enhanced phenotypes in plants such as those that exhibit protection against pest, disease agents and abiotic stress, as well as increased plant growth, productivity and yield. More specifically, the formulations of the bioactive priming polypeptides and/or inducer compounds described herein can be applied using various treatment regimes, exogenously and/or endogenously to a plant or plant part, and have been discovered to increase growth, yield, health, longevity, productivity, and/or vigor of a plant or a plant part and/or protect the plant or the plant part from disease, and/or increase the innate immune response of the plant or the plant part.

[0123] Specific classes of synthetically derived or naturally occurring bioactive priming polypeptides that can be included, alone or in combination, in the compositions herein include flagellins and flagellin-associated polypeptides (including those conserved among the Bacillus genera), thionins, root hair promoting polypeptide (RHPP), serine proteases, glucanases, amylases, chitinases, and ACC deaminases. Each of these classes of polypeptides were selected for their distinct modes of action and can be used individually or in combination with other polypeptides to accommodate the specific agricultural needs described above. For example, in certain cases, isolated polypeptides from these classes can be used individually to accommodate the specific agricultural needs described above. They can be used in the place of or in addition to commercially available agrochemicals, biostimulants, supplemental bioactives and/or pesticidal compounds.

[0124] Specific classes of inducer compounds include amino acids (particularly, isolated amino acids) and isomers thereof, certain acids (e.g., substituted or unsubstituted benzoic acids and dicarboxylic acids), bacteriocides, callose synthase inhibitors, succinate dehydrogenase inhibitors, benzothiazoles, and osmoprotectants (e.g., betaines or prolines). Specific inducers in these classes will be described below.

[0125] Isolated polypeptides and combinations of the bioactive priming polypeptides and/or the inducer compounds described herein have been found to have a synergistic effect on plant health, yield and disease prevention/treatment. Combinations described herein are particularly effective at treating citrus diseases and improving the yield and quality of a fruit and/or juice obtained from a citrus plant. Further, the compositions provide synergistic benefits to improve the yield and productivity of row crops.

### I. Compositions

[0126] Novel bioactive priming compositions are provided herein. More specifically, a composition is provided for bioactive priming of a plant or a plant part to increase growth, yield, health, longevity, productivity, and/or vigor of a plant or a plant part and/or protect the plant or the plant part from disease, and/or increase the innate immune response of the plant or the plant part and/or increase the quantity and/or quality of juice obtained from a citrus plant. The compositions can comprise a β-1,3-glucanase, or (A) at least one bioactive priming polypeptide and an inducer compound or (B) at least two bioactive priming polypeptides, optionally with an inducer compound or (C) at least two inducer compounds. The bioactive priming polypeptides and inducer compounds that can be used in these compositions and the specific methods where they can be used are described below.

[0127] Another composition is provided for bioactive priming of a plant or a plant part to increase growth, yield, health, longevity, productivity, and/or vigor of a plant or a plant part and/or protect the plant or the plant part from disease, and/or increase the innate immune response of the plant or the plant part and/or increase the quantity and/or quality of juice obtained from a plant. The compositions can comprise bixafen and a free polypeptide (i.e., not bound to an exosporium of a Bacillus cereus family member or an intact Bacillus cereus family member spore). The free polypeptide can comprise (i) a flagellin or flagellin-associated polypeptide; or (ii) a retro inverso flagellin or flagellin-associated polypeptide; or (iii) a root hair promoting polypeptide (RHPP); or (iv) a retro inverso root hair promoting polypeptide (RI RHPP); or (v) a thionin or thionin-like polypeptide; or (vi) a glucanase polypeptide; or (vii) a serine protease polypeptide; or (viii) an ACC deaminase (1-aminocyclopropane-1-carboxylate deaminase) polypeptide; or (ix) an amylase; or (x) a chitinase; or (xi) any combination thereof.

a. Polypeptides and Compositions Thereof

[0128] The compositions described herein can comprise one or more bioactive priming polypeptides or free polypeptides. The bioactive priming peptides and free polypeptides can comprise at least one flagellin or flagellin associated polypeptide, at least one retro-inverso flagellin or flagellin associated polypeptide, at least one root hair promoting polypeptide (RHPP), at least one retro inverso root hair promoting polypeptide (RI-RHPP), at least one thionin or thionin-like polypeptide, at least one glucanase polypeptide, at least one serine protease polypeptide, at least one amylase polypeptide, at least one chitinase polypeptide, at least one ACC deaminase polypeptide or any combination thereof.

[0129] The bioactive priming polypeptides and free polypeptides used in the compositions and methods described herein are provided as naturally occurring, recombinant or chemically synthesized forms derived from bacteria or plants. The bioactive priming polypeptides are provided in both the normal L and non-natural retro-inverso D amino-acid forms. In addition, bioactive priming polypeptides are provided that contain non-natural modifications, including N-terminal and C-terminal modifications, cyclization, β-amino and D-amino acid containing, and other chemical modifications that enhance stability or performance of the polypeptides. For example, flagellin and the Flg-associated polypeptides comprising 22 amino acids in length and derived from the full coding region of flagellin were initially isolated and identified from a proprietary genome assembled for bacterial strain, Bacillus thuringiensis 4Q7. These Flg22 derived polypeptides were provided in the standard (L) and retro-inverso (D) forms. They are described as Bt.4Q7Flg22 and retro-inverso (RI) Bt.4Q7Flg22. Other bacterial derived bioactive priming polypeptides are Ec.Flg22 (Escherichia coli), X.Flg22 (Xanthomonas sp.), and other Flg22 from other bacterial species, serine proteases (Bacillus subtilis and other bacterial species), ACC deaminases (Bacillus thuringinesis and other bacterial species), β-1,3-D-glucanases (Paenibacillus spp. and other bacterial species) and amylases (Bacillus subtilis and other bacterial species) while the plant derived polypeptides include thionins (Citrus spp. and other plant species), and RHPP (Glycine max).

[0130] The bioactive priming polypeptides and free polypeptides used in the compositions and methods described herein can include full-length proteins and are provided as naturally occurring, synthetic or recombinant forms derived from bacteria or plants. For example, flagellins, thionins, RHPPs, serine proteases, glucanases, amylases, chitinases, and ACC deaminases can all be delivered to plants.

[0131] The bioactive priming polypeptides and free polypeptides can also be delivered as fusion partners to other protein sequences, including protease cleavage sites, binding proteins, and targeting proteins to prepare formulations for specific delivery to plants or plant parts.

[0132] Also provided are signature, signal anchor sorting and secretion sequences that can be naturally or chemically synthesized and targeting sequences, such as phloem-targeting sequences that are produced along with the bioactive priming polypeptide(s) and free polypeptides using recombinant microorganisms and either used as fusion or assistance polypeptides with the bioactive priming polypeptides and free polypeptides as described herein.

[0133] Flagellins and Flagellin-Associated Polypeptides

[0134] The composition can comprise a flagellin or flagellin-associated polypeptide.

[0135] Flagellin is a globular protein that arranges itself in a hollow cylinder to form the filament in a bacterial flagellum identified from a proprietary bacterial strain of Bacillus thuringiensis strain 4Q7. Flagellin is the principal substituent of bacterial flagellum and is present in flagellated bacteria. Plants can perceive, combat infection and mount defense signaling against bacterial microbes through the recognition of conserved epitopes, such as the stretch of 22 amino acids (Flg22) located in the N-terminus of a full length flagellin coding sequence. The elicitor activity of Flg22 polypeptide is attributed to this conserved domain within the N-terminus of the flagellin protein (Felix et al., 1999). Plants can perceive bacterial flagellin through a pattern recognition receptor (PRR) at the plant's cell surface known as flagellin sensitive receptor, which is a leucine-rich repeat receptor kinase located in the plasma membrane and available at the plant cell surface. In plants, the best-characterized PRR is FLAGELLIN SENSING 2 (FLS2), which is highly conserved in both monocot and dicot plants. A Bt.4Q7Flg22Syn01 is a mutagenized form of the native version Bt.4Q7Flg22 that exhibits an increased activity using assays to the generation of reactive oxygen response which positively correlates to increases in plant immunity and disease resistance in plants.

[0136] Flagellin or flagellin-associated polypeptides are particularly useful in compositions for treating bacterial diseases in plants. Upon infection, Candidatus Liberbacter asiaticus (CLas) evades immune detection in part due to point mutations in the flagellin protein FliC that prevent either binding and/or activation of the plant immune receptor Flagellin-Sensing 2 (FLS2). Activation of FLS2 by flagellin protein fragments, such as Bt.4Q7Flg22 triggers production of antimicrobial reactive oxygen species (ROS), up-regulates the plant defense hormone salicylic acid, alters gene expression patterns, and promotes expression of antimicrobial proteins. While CLas flagellin evades detection by the plant, a 22-amino sequence of flagellin FliC from the non-pathogenic bacterium Bacillus thuringiensis strain 4Q7, Bt.Flg22, and the mutagenized form Bt.4Q7Flg22Syn01 are recognized by citrus plants. Bt.4Q7Flg22 or Bt.4Q7Flg22Syn01 treatment induces rapid ROS production, thus activating the plant immune system, leading to reduced CLas bacterial titer in the plant, thus promoting new foliar growth and flowering, which ultimately improves fruit yield.

[0137] The flagellin or flagellin-associated polypeptide can be derived from a Bacillus, a Lysinibacillus, a Paenibacillus, an Aneurinibacillus genus bacterium, or any combination thereof.

[0138] One of the main classes of bioactive priming polypeptides as described herein are the flagellin(s) and the flagellin-associated priming polypeptide(s). Conserved full and partial length amino acid flagellin coding sequences were identified from various species of Bacillus and non-Bacillus bacteria using methods as described herein.

[0139] Flagellin is a structural protein that forms the main portion of flagellar filaments from flagellated bacterial species that can show conservation in the N-terminal and C-terminal regions of the protein but can be variable in the central or mid part (Felix G. et al., “Plants have a sensitive perception system for the most conserved domain of bacterial flagellin,” The Plant Journal 18: 265-276, 1999). The N- and C-terminal conserved regions from flagellins that form the inner core of the flagellin protein may have roles in the polymerization of the protein into a filament, in the motility and transport of the protein and in the surface attachment of a peptide fragment to the plant cell membrane/cell surface receptors of a plant.

[0140] Full or partial flagellins (Tables 1-2) and the flagellin-associated polypeptides derived from those Bacillus and non-Bacillus flagellins (Tables 3 and 5) are provided.

[0141] The amino acid sequence of the flagellin or flagellin-associated polypeptide can comprise any one of SEQ ID NOs: 226, 1-225, 227-375, 526, 528, 530, 532, 534, 536, 538, 540, 541, or 572-603, or any combination thereof.

[0142] Flagellin-associated bioactive priming polypeptides are produced from flagellin coding polypeptides (such as the precursor proteins of Flg22). More specifically, a polypeptide or a cleaved fragment derived from the polypeptide is provided to achieve a bioactive priming Flg polypeptide that can be used to prime or treat a plant. The cleavage of the Flg22 fragment from larger precursors can be accomplished through introduction of proteolytic cleavage sites near the Flg22 to facilitate processing of the active biopeptide from the larger polypeptide.

[0143] The flagellin-associated bioactive priming polypeptides can be derived from full length flagellin proteins (or precursor proteins from Flg-associated polypeptides from a Bacillus, a Lysinibacillus, a Paenibacillus, or an Aneurinibacillus or other non-related genera bacterium). For example, PCR purified DNA from the flagellin-associated polypeptides such as Flg22 and FlgII-28 (Bacillus genera) and Flg15 and Flg22 (E. coli) are cloned into a recombinant vector, amplified to achieve adequate amounts of purified DNA that is then sequenced using conventional methods known and used by one of ordinary skill in the art. The same methods can be used with the flagellin coding or the flagellin partial sequences (Table 1), N- or C-terminal flagellin polypeptides (Table 2) and any of the Flg-associated polypeptides (Tables 3-5).

[0144] The flagellin or flagellin-associated polypeptide can be derived from any member of Eubacteria that contains the conserved 22 amino acid region that is recognized by the plants. Preferred flagellin or flagellin-associated polypeptides can be derived from a Bacillus, a Lysinibacillus, a Paenibacillus, an Aneurinibacillus genus bacterium, or any combination thereof. Additional preferred flagellin and Flg22 sequences can be obtained from the gammaproteobacteria, which contain conserved 22 amino acid sequences of >68% identity.

[0145] Conserved Flagellin Sequences from Bacillus

[0146] The flagellin-associated bioactive priming polypeptides correspond to the N-terminal conserved domains of Bacillus spp. and other Eubacterial flagellin and are provided as synthetic, recombinant or naturally occurring forms. The flagellin bioactive priming polypeptides of Flg22, Flg15 and FlgII-28 (Table 3) were identified and act as potent elicitors on a wide range of crops and vegetables to prevent and treat the spread of select disease(s) while synergistically stimulating and promoting growth responses in plants.

[0147] The flagellin and flagellin-associated bioactive priming polypeptides as described herein are provided for use in compositions either individually or in combination with other bioactive priming polypeptides as described herein, and include conserved full and partial flagellins from Bacillus (Table 1), conserved N- and C-terminal regions from flagellin polypeptides (Table 2), Bacillus derived Flg22 and FlgII-28-derived bioactive priming polypeptides (Table 3) and retro-inverso sequences that are mirror images derived from the Bacillus Flg22 and FlgII-28 (Table 4). The underlined portion of the sequences in Tables 1 and 3 represent identified signal anchor sorting or secretion sequences, and signal anchoring sequences, respectively. Other non-Bacillus derived polypeptide and proteins are also described that are functional equivalents and can be utilized in similar fashion (Table 5).

TABLE 1
Conserved flagellin sequences from Bacillus

| SEQ ID NO: | Full or Partial Flagellin Coding Sequence - Amino Acid |
|---|---|
| Flagellin | MRINTNINSMRTQEYMRQNQAKMSNAMDRLSSGKRINSASDD |
| SEQ ID NO: 1 | AAGLAIATRMKAREGGLNVAGRNTQDGMSLIRTADSALNSVS |
| Bacillus | NILLRMRDLANQSANGTNTKGNQASLQKEFAQLTEQIDYIAKN |
| thuringiensis strain | TQFNDQQLLGTADKKIKIQTLDTGSTNPAQIEITLNSVKSADLGL |
| 4Q7 | DVQIGDEGDAESTAAADPTSAKQAIDAIDAAITTVAGQRATLGA |
| | TLNRFEFNANNLKSQETSMADAASQIEDADMAKEMSEMTKFKI |
| | LNEAGISMLSQANQTPQMVSKLLQ |
| Flagellin | MRINTNINSMRTQEYMRQNQAKMSNAMDRLSSGKRINSASDD |
| SEQ ID NO: 2 | AAGLAIATRMKAREGGLNVAGRNTQDGMSLIRTADSALNSVS |
| Bacillus | NILLRMRDLANQSANGTNTKGNQASLQKEFAQLTEQIDYIAKN |
| thuringiensis, strain | TQFNDQQLLGTADKKIKIQTLDTGSTNPAQIEITLNSVKSADLGL |
| HD1002 | DVQIGDEGDAESTAAADPTSAKQAIDAIDAAITTVAGQRATLGA |
| | TLNRFEFNANNLKSQETSMADAASQIEDADMAKEMSEMTKFKI |
| | LNEAGISMLSQANQTPQMVSKLLQ |
| Flagellin | MRINTNINSMRTQEYMRQNQAKMSNAMDRLSSGKRINSASDD |
| SEQ ID NO: 3 | AAGLAIATRMKAREGGLNVAGRNTQDGMSLIRTADSALNSVS |
| Bacillus | NILLRMRDLANQSANGTNTKGNQASLQKEFAQLTEQIDYIAKN |
| thuringiensis, | TQFNDQQLLGTADKKIKIQTLDTGSTNPAQIEITLNSVKSADLGL |
| strain HD-789 | DVQIGDEGDAESTAAADPTSAKQAIDAIDAAITTVAGQRATLGA |
| | TLNRFEFNANNLKSQETSMADAASQIEDADMAKEMSEMTKFKI |
| | LNEAGISMLSQANQTPQMVSKLLQ |
| Flagellin | MRINTNINSMRTQEYMRQNQAKMSNAMDRLSSGKRINSASDD |
| SEQ ID NO: 4 | AAGLAIATRMKAREGGLNVAGRNTQDGMSLIRTADSALNSVS |
| Bacillus cereus | NILLRMRDLANQSANGTNTKGNQASLQKEFAQLTEQIDYIAKN |
| strain G9842 | TQFNDQQLLGTADKKIKIQTLDTGSTNPAQIEITLNSVKSADLGL |
| | DVQIGDEGDAESTAAADPTSAKQAIDAIDAAITTVAGQRATLGA |
| | TLNRFEFNANNLKSQETSMADAASQIEDADMAKEMSEMTKFKI |
| | LNEAGISMLSQANQTPQMVSKLLQ |
| Flagellin | MRIGTNVLSMNARQSLYENEKHMNVAMEHLATGKKLNNASD |
| SEQ ID NO: 5 | NPANIAIVTRMHARASGMRVAIRNNEDAISMLRTAEAALQTVT |
| Bacillus | NILQRMRDLAVQSANGTNSNKNRHSLNKEFQSLTEKIGYIGETT |
| thuringiensis | EFNDLSVFEGQNRPITLDDIGHTINMMKHIPPSPTQHDIKISTEQE |
| serovarindiana | ARAAILKIEDALQSVSLHRADLGAMINRLQFNIENLNSQSMALT |
| strain HD521 | DAASLIEDADMAQEMSDFLKFKLLTEVALSMVSQANQIPQMVS |
| | KLLQS |
| Flagellin | MRINTNINSMRTQEYMRQNQAKMSNSMDRLSSGKRINNASDD |
| SEQ ID NO: 6 | AAGLAIATRMRARESGLGVAADNTQNGMSLIRTADSAMNSVS |
| Bacillus | NILLRMRDIANQSANGTNTNENKSALQKEFAQLQKQITYIAENT |
| thuringiensis strain | QFNDKNLLNEDSEVKIQTLDSSKGEQQITIDLKAVTLEKLNIKDI |
| CTC | AIGKADAADKPVTPGATVDQKDLDSVTDKIAALTETSSKADID |
| | AIQSSLDNFKASMTPEDVKTLEDALKGFKTGQANPADAGVDAI |
| | QDALSKVKLPTATAAAPAADADKSDALAAIAAIDAALTKVAD |
| | NRATLGATLNRLDFNVNNLKSQSSSMASAASQIEDADMAKEM |
| | SEMTKFKILNEAGISMLSQANQTPQMVSKLLQ |
| Flagellin | MTGITINLEIDFFAYYRFSICRKVNIKKWGFLNMRINTNINSMRT |
| SEQ ID NO: 7 | QEYMRQNQAKMSNAMDRLSSGKRINNASDDAAGLAIATRMR |
| Bacillus | ARENGLGVAANNTQDGMSLIRTADSAMNSVSNILLRMRDLAN |
| thuringiensis | QSANGTNTDDNQKALDKEFSALKEQIDYISKNTEFNDKKLLNG |
| serovaryunnanensis | ENKTIAIQTLDNADTTKQININLADSSTSALQIDKLTISGKTTDTT |
| strain IEB C- T20001 | KTETITVTDDEIKAAKTDIDEFNDAKKALADLKAETSAGKADGS |
| | TDDEIKTAVSNFTKSFEKIQKFMNDSDIKTVQTEIEKFDAAAPAL |
| | DKAKGMGIAFTSAMDPKAGTITKAATRQNASDAIKSIDAALETI |
| | ASNRATLGATLNRLDFNVNNLKSQSSSMAAAASQIEDADMAK |
| | EMSEMTKFKILNEAGISMLSQANV |
| Flagellin | MRINTNINSMRTQEYMRQNQAKMSNAMDRLSSGKRINNASDD |
| SEQ ID NO: 8 | AAGLAIATRMRARENGLGVAANNTQDGMSLIRTADSALQSVS |
| Bacillus | NILLRMRDLANQSANGTNTDENKAAMEKEFGQLKDQIKYITDN |
| thuringiensis | TQFNDKNLLDAASGTTKSIAIQTLDSDQASTQIEIKIAGSSLAAL |
| serovar tolworthi | GLDKVQIGQETVAQKDLDVLTKAMGRLAAPDADATTRDLDVQ |
| | VAKDAFDKVKGFIADPAQAKAVERAFEDYTAAEAGKEEDAAK |
| | AIDAAYKKVTGLTAGTTGTVDAHNAVNKIDAALKTVADNRAT |
| | LGATLNRLDFNVNNLKSQSASMASAASQIEDADMAKEMSEMT |
| | KFKILNEAGISMLSQANQTPQMVSKLLQ |
| Flagellin | MRINTNINSMRTQEYMRQNQAKMSNSMDRLSSGKRINNASDD |
| SEQ ID NO: 9 | AAGLAIATRMRARESGLGVAANNTQDGMSLIRTADSAMNSVS |
| Bacillus cereus | NILLRMRDIANQSANGTNTDKNQVALQKEFGELQKQIDYIAKN |
| strain FM1 | TQFNDKNLLSGKAGAPDQALEINIQTLDSSDPNQQIKISLDSVST |
| | AQLGVKDLQIGSSSITQQQLDTLDNAMKRLETASTTAAVRDQD |
| | VADAKAAFENVKGFFSEGNVDSINRAFTDFANETTNKDDKAEA |
| | IYALYNNATLITKPTPDASNPASVDPANAIKKIDQAIEKIASSRAT |
| | LGATLNRLDFNVNNLKSQQSSMASAASQVEDADMAKEMSEMT |
| | KFKILNEAGISMLSQANQTPQMVSKLLQ |
| Flagellin | MRIGTNVLSMNARQSFYENEKRMNVAIEHLATGKKLNHASDN |
| SEQ ID NO: 10 | PANVAIVTRMHARTSGIHVAIRNNEDAISMLRTAEAALQTVTNI |
| Bacillus cereus | LQRMRDVAVQSANGTNSNKNRDSLNKEFQSLTEQIGYIDETTEF |
| strain FM1 | NDLSVFDRQNCPVTLDDIGHTVNVTKHIPPSPTQHDINTSTEQEA |
| | RAAIRKIEETLQNVSLHRADLGAMINQLQFNIENLNSQSTALTD |
| | AASRIEDADMAQEMSDFLKFKLLTEVALSMVSQANQIPQMVY |
| | KLLQS |
| Flagellin | MDRLSSGKRINNASDDAAGLAIATRMRARESGLGVAANNTQD |
| SEQ ID NO: 11 | GMSLIRTADSALNSVSNILLRMRDIANQSANGTNTADNQQALQ |
| Bacillus | KEFGQLKEQISYIADNTEFNDKTLLKADNSVKIQTLDSADTNKQ |
| thuringiensis strain | ISIDLKGVTLNQLGLDTVNIGSEKLSAESLNVAKATMARLVKAD |
| MC28 | QNADPSTFALDVNTAKESFDKIKGFIANKTNVQNVENAFNDYA |
| | VADPADKADKADAIQAAFNTAITGLTAGTPNTSNPSSAVDSIDA |
| | ALKTVASNRATLGATLNRLDFNVNNLKSQSASMASAASQIEDA |
| | DMAKEMSEMTKFKILNEAGISMLSQANQTPQMVSKLLQ |
| Flagellin | MRINTNINSMRTQEYMRQNQAKMSNSMDRLSSGKRINNASDD |
| SEQ ID NO: 12 | AAGLAIATRMRSREGGLNVAARNTEDGMSLIRTADSALNSVSN |
| Bacillus | ILLRMRDLANQSASGTNTDKNQAAMQKEFDQLKEQIQYIADNT |
| bombysepticus | EFNDKKLLDGSNSTINTQTLDSHDKNKQITISLDSASLKNLDIKD |
| strain Wang | LAIGSATINQTDLDTATNSMKRLATPATDGKVLAQDIADAKAA |
| | FNKVQSAYTPAEVDKIQDAFKAYDKLAADPASKATDIADAAK |
| | NVNTVFGTLATPTATKFDPSSAVEKIDKAIETIASSRATLGATLN |
| | RLDFNVTNLKSQENSMAASASQIEDADMAKEMSEMTKFKILNE |
| | AGISMLSQANQTPQMVSKLLQ |
| Flagellin | MTGITINLEIDFFAYYRFSICRKVNIKKWGFLNMRINTNINSMRT |
| SEQ ID NO: 13 | QEYMRQNQAKMSNSMDRLSSGKRINNASDDAAGLAIATRMRS |
| Bacillus | REGGLNVAARNTEDGMSLIRTADSALNSVSNILLRMRDLANQS |
| thuringiensis | ASGTNTDKNQAAMQKEFDQLKEQIQYIADNTEFNDKKLLDGSN |
| serovar kenyae | STINTQTLDSHDKNKQITISLDSASLKNLDIKDLAIGSATINQTDL |
| | DTATNSMKRLATPATDGKVLAQDIADAKAAFNKVQSAYTPAE |
| | VDKIQDAFKAYDKLAADPASKDTDIADAAKNVNTVFGTLATPT |
| | ATKFDPSSAVEKIDKAIETIASSRATLGATLNRLDFNVTNLKSQE |
| | NSMAASASQIEDADMAKEMSEMTKFKILNEAGISMLSQANQTP |
| | QMVSKLLQ |
| Flagellin | MRINTNINSMRTQEYMRQNQAKMSNSMDRLSSGKRINNASDD |
| SEQ ID NO: 14 | AAGLAIATRMRSREGGLNVAARNTEDGMSLIRTADSALNSVSN |
| Bacillus | ILLRMRDLANQSASGTNTDKNQAAMQKEFDQLKEQIQYIADNT |
| thuringiensis | EFNDKKLLDGSNSTINTQALDSHDKNKQITISLDSASLKNLDIKD |
| serovar kenyae | LAIGSATINQTDLDTATNSMKRLATPATDGKVLAQDIADAKAA |
| | FNKVQSAYTPAEVDKIQDAFKAYDKLAADPASKDTDIADAAK |
| | NVNTVFGTLATPTATKFDPSSAVEKIDKAIETIASSRATLGATLN |
| | RLDFNVTNLKSQENSMAASASQIEDADMAKEMSEMTKFKILNE |
| | AGISMLSQANQTPQMVSKLLQ |
| Flagellin (A-type) | MRINTNINSMRTQEYMRQNQAKMSNAMDRLSSGKRINNASDD |
| SEQ ID NO: 15 | AAGLAIATRMRARENGLGVAANNTQDGMSLIRTADSALNSVS |
| Bacillus cereus | NILLRMRDLANQSANGTNTGDNQKALDKEFSALKEQIDYISKN |
| | TEFNDKKLLNGDNKTIAIQTLDNADTSKQININLADSSTSALKIE |
| | KLTISGSTAIAGKTEKVTITAEDIKAAEEDIKAFTQAQEGLANLV |
| | KEVKDTDGSVKTPGSTPDDIKKAVTAFTESFEKMKKFMNDEDI |
| | TKVEEKIKAFDAASPDLDAAKEMGTAFTAAMKPAAGEITKAA |
| | MKPNASDAIKSIDEALETIASNRATLGATLNRLDFNVNNLKSQS |
| | SSMASAASQIEDADMAKEMSEMTKFKILNEAGISMLSQANQTP |
| | QMVSKLLQ |
| Flagellin (A-type) | MRIGTNVLSMNARQSLYENEKRMNVAMEHLATGKKLNNASD |
| SEQ ID NO: 16 | NPANIAIVTRMHARASGMRLAIRNNEDTISMLRTAEAALQTLTN |
| Bacillus cereus | ILQRMRDLAVQSANGTNSNKNRDSLNKEFQSLTEQIGYIGETTE |
| | FNDLSVFDGQNRPVTLDDIDHTINMTKHIPPSPTQHDIKISTEQE |
| | ARAAILKIEEALQSVSIHRADLGSMINRLQFNIENLNSQSMALTD |
| | AASRIEDADMAQEMSDFLKFKLLTEVALSMVSQANQIPQMVSK |
| | LLQS |
| Flagellin | MRIGTNVLSMNARQSLYENEKRMNVAMEHLATGKKLNHASD |
| SEQ ID NO: 17 | NPANVAIVTRMHARASGMRVAIRNNEDAISMLRTAEAALQTVT |
| Bacillus | NVLQRMRDVAVQSANGTNLNKNRDSLNNEFQSLTEQIGYIDET |
| thuringiensis | TAFNDLSVFDGQNRPVTLDDIGHTVNVTKHISPSPTQHDINTSTE |
| serovar finitimus | QEARAAIRKIEEALQNVSLYRADLGAMINRLQFNIENLNSQSTA |
| strain YBT-020 | LTDAASRIEDADMAQEMSDFLKFKLLTEVALSMVSQANQIPQM |
| | VYKLLQS |
| Flagellin | MRINTNINSMRTQEYMRQNQAKMSNAMDRLSSGKRINNASDD |
| SEQ ID NO: 18 | AAGLAIATRMRARESGLNVAADNTQNGMSLIRTADSAMNSVS |
| Bacillus | NILLRMRDIANQSANGTNTDSNKSALQKEFAELQKQITYIADNT |
| thuringiensis | QFNDKNLLKEDSEVKIQTLDSSKGEQQIGIDLKAVTLEKLGINNI |
| serovar finitimus | SIGKADGTTEGTKADLTALQAAAKKLEKPDTGTMEKDVKDAK |
| strain YBT-020 | EEFDKVKASLSDEDVKKIEAAFGEFDKDKTNTTKASDIFNAIKD |
| | VKLADKAAAAPAPADLTKFKAALDKLQTPNAGTMVDDVKDA |
| | KDEFEKIKGSLSDADAQKIQAAFEEFEKANTDDSKASAIYNLAK |
| | DVKVNATDTTTGTDKDTTTSTDKDAALAAIAAIDAALTKVADN |
| | RATLGATLNRLDFNVNNLKSQSSSMASAASQIEDADMAKEMSE |
| | MTKFKILNEAGISMLSQANQTPQMVSKLLQ |
| Flagellin | MRINTNINSMRTQEYMRQNQAKMSNAMDRLSSGKRINNASDD |
| SEQ ID NO: 19 | AAGLAIATRMRARESGLGVAANNTQDGMSLIRTADSALNSVSN |
| Bacillus cereus | ILLRMRDLANQSANGTNTAENKAAMQKEFGELKDQIKYISENT |
| stain B4264 | QFNDQHLLNAAKGSTNEIAIQTLDSDSSSKQIKITLQGASLDSLD |
| | IKDLQIGSGSTVSQTDLDVLDATMTRVKTATGATRDVDVQAAK |
| | SAFDKVKGLMTKPAEVKAIERAFEDYNAGKTDALATAIEAAYT |
| | ANKTGLPAPAAAAGTVDALGAITKIDAALKTVADNRATLGATL |
| | NRLDFNVNNLKSQSASMASAASQIEDADMAKEMSEMTKFKILN |
| | EAGISMLSQANQTPQMVSKLLQ |
| Flagellin | MRINTNINSMRTQEYMRQNQAKMSNAMDRLSSGKRINNASDD |
| SEQ ID NO: 20 | AAGLAIATRMRARESGLGVAANNTQDGMSLIRTADSALNSVSN |
| Bacillus | ILLRMRDIANQSANGTNTSDNQKALDKEFSALKEQIDYISKNTE |
| thuringiensis | FNDKKLLNGDNKSIAIQTLDNADTTKQININLADSSTTALNIDKL |
| serovar nigeriensis | SIEGTGNKTITLTAADIAKDKANIDAVGTAKTALAGLTGTPAAA |
| | AINSAVADFKTAFAKADKNLMSDAQIKAVTDAITAFEADATPD |
| | LTKAKAIGTAYTAPAAGDITKASPNASEAIKSIDAALDTIASNRA |
| | TLGATLNRLDFNVNNLKSQSSSMASAASQIEDADMAKEMSEM |
| | TKFKILNEAGISMLSQANQTPQMVSKLLQ |
| Flagellin | MRINTNINSMRTQEYMRQNQAKMSNAMDRLSSGKRINNASDD |
| SEQ ID NO: 21 | AAGLAIATRMRARESGLGVAANNTQDGMSLIRTADSALNSVSN |
| Bacillus | ILLRMRDIANQSANGTNTADNQQALQKEFGQLKEQISYIADNTE |
| thuringiensis | FNDKTLLKADNSVKIQTLDSADTNKQISIDLKGVTLNQLGLDTV |
| | NIGSETLSAESLNVAKATMARLVKADQNADPSTFALDVNTAKE |
| | SFDKIKGFITNKTNVQNVENAFNDYTVADPADKADKADAIQAA |
| | FNTAITGLTAGTPNTSNPSSAVDAIDAALKTVASNRATLGATLN |
| | RLDFNVNNLKSQSASMASAASQIEDADMAKEMSEMTKFKILNE |
| | AGISMLSQANQTPQMVSKLLQ |
| Flagellin | MRIGTNVLSMNARQSLYENEKRMNVAMEHFATGKKLNHASD |
| SEQ ID NO: 22 | NPANVAIVTRMHARASGMRVAIRNNEDAISMLRTAEAALQTV |
| Bacillus | MNILQRMRDLAVQSANGTNSNKNRDSLNKEFQSLTEQIGYIGE |
| thuringiensis | TTEFNDLSVFDGQNRPVTLDDIGHTVNVTKHTSPSPTKHDIKIST |
| serovar konkukian | EQEARAAIRKIEEALQNVSLHRADFGAMINRLQFNIENLNSQSM |
| strain 97-27 | ALTDAASRIEDADMAQEMSDFLKFKLLTEVALSMVSQANQIPQ |
| | MVSKLLQS |
| Flagellin | MRINTNINSMRTQEYMRQNQAKMSNAMDRLSSGKRINNASDD |
| SEQ ID NO: 23 | AAGLAIATRMRARESGLGVAANNTQDGMSLIRTADSALNSVSN |
| Bacillus | ILLRMRDIANQSANGTNTADNQQALQKEFGQLKEQISYIADNTE |
| thuringiensis | FNDKTLLKADNSVKIQTLDSADTNKQISIDLKGVTLNQLGLDTV |
| serovar konkukian | NIGSETLSAESLNVAKATMARLVKADQNADPSTFALDVNTAKE |
| strain 97-27 | SFDKIKGFITNKTNVQNVENAFNDYTVADPADKADKADAIQAA |
| | FNTAITGLTAGTPNTSNPSSAVDAIDAALKTVASNRATLGATLN |
| | RLDFNVNNLKSQSASMASAASQIEDADMAKEMSEMTKFKILNE |
| | AGISMLSQANQTPQMVSKLLQ |
| Flagellin protein | MRIGTNVLSMNARQSLYENEKRIVINVAMEHLATGKKLNHASD |
| FlaA | NPANIVIVTRMYARASGMRVAIRNNEDAISMLRTAEAALQTVT |
| SEQ ID NO: 24 | NILQHMRDFAIQSANGTNSNTNRDSLNKEFQSLTEPIGYIGETTE |
| Bacillus | FNDLSVFDGQNRPITLDDIGHTINMTKHIPPSPTQHDIKISTEQEA |
| thuringiensis | RAAIRKIEEALQNVSLHRADLGSMINRLQFNIENLNSQSMALIDT |
| serovar | ASQVEDADMAQEISDFLKFKLLTAVALSVVSQANQIPQIVSKLL |
| thuringiensis strain | QS |
| IS5056 | |
| Flagellin protein | MRINTNINSMRTQEYMRQNQAKMSNAMDRLSSGKRINNASDD |
| FlaA | AAGLAIATRMRARESGLGVAANNTQDGMSLIRTADSAMNSVS |
| SEQ ID NO: 25 | NILLRMRDISNQSANGTNTDKNQSALDKEFAALKDQIDYISKNT |
| Bacillus | EFNDQKLLDGSKKSIAIQTLDNADTNKQIDIQLSNVSTKELKLDT |
| thuringiensis | LSIEGSSSKTFTITADDMLAVGTANATAKAKAGTLKGLNVTTG |
| serovar | DLTAAKTDVQDFRAAFDKVKGFMGSTEVTNIEKALTKFDGDQS |
| thuringiensis strain | LANAKAIGDALTSDLATTIAKDQTYSKNVSNASSAIASIDAALES |
| IS5056 | IASNRATLGATLNRLDFNVNNLKSQSSSMASAASQIEDADMAK |
| | EMSEMTKFKILNEAGISMLSQANQTPQMVSKLLQ |
| Flagellin B | MRINTNINSMIRTQEYMRQNQAKMSNAMDRLSSGKRINNASDD |
| SEQ ID NO: 26 | AAGLAIATRMRARESGLGVAANNTQDGMSLIRTADSAMNSVS |
| Bacillus | NILLRMRDISNQSANGTNTDKNQSALDKEFAALKDQIDYISKNT |
| thuringiensis | EFNDQKLLDGSKKSIAIQTLDNADTNKQIDIQLSNVSTKELKLDT |
| strain Bt407 | LSIEGSSSKTFTITADDMLAVGTANATAKAKAGTLKGLNVTTG |
| | DLTAAKTDVQDFRAAFDKVKGFMGSTEVTNIEKALTKFDGDQS |
| | LANAKAIGDALTSDLATTIAKDQTYSKNVSNASSAIASIDAALES |
| | IASNRATLGATLNRLDFNVNNLKSQSSSMASAASQIEDADMAK |
| | EMSEMTKFKILNEAGISMLSQANQTPQMVSKLLQ |
| Flagellin | MRINTNINSMIRTQEYMRQNQAKMSNAMDRLSSGKRINNASDD |
| SEQ ID NO: 27 | AAGLAIATRMRARESGLGVAANNTQDGMSLIRTADSAMNSVS |
| Bacillus | NILLRMRDISNQSANGTNTDKNQSALDKEFAALKDQIDYISKNT |
| thuringiensis | EFNDQKLLDGSKKSIAIQTLDNADTNKQIDIQLSNVSTKELKLDT |
| serovar chinensis | LSIEGSSSKTFTITADDMLAVGTANATAKAKAGTLKGLNVTTG |
| CT-43 | DLTAAKTDVQDFRAAFDKVKGFMGSTEVTNIEKALTKFDGDQS |
| | LANAKAIGDALTSDLATTIAKDQTYSKNVSNASSAIASIDAALES |
| | IASNRATLGATLNRLDFNVNNLKSQSSSMASAASQIEDADMAK |
| | EMSEMTKFKILNEAGISMLSQANQTPQMVSKLLQ |
| Flagellin | MTGITINLEIDFFAYYRFSICRKVNIKKWGFLNMRINTNINSMRT |
| SEQ ID NO: 28 | QEYMIRQNQAKMSNAMDRLSSGKRINNASDDAAGLAIATRMR |
| Bacillus | ARESGLGVAANNTQDGISLIRTADSAMNSVSNILLRMRDLANQ |
| thuringiensis | SANGTNTNENQAALNKEFDALKEQIDYISTNTEFNDKKLLDGS |
| serovar canadensis | NKTIAVQTLDNADTSKQININLSNVSTKELGLDTLSIGTDKVEKT |
| | VYDATTKAFADLGAKTGADKAAFDADVTAAMKEFDKVKPFM |
| | SADDVKKIETKLEDYNKANDAGAQTAAQALGKEFATLTKLETT |
| | DLKANASGAIASIDTALKNIASNRATLGATLNRLDFNVNNLKSQ |
| | SSSMASAASQIEDADMAKEMSEMTKFKILNEAGISMLSQANQT |
| | PQMVSKLLQ |
| Flagellin | MTGITINLEIDFFAYYRFSICRKVNIKKWGFLNMRINTNINSMRT |
| SEQ ID NO: 29 | QEYMIRQNQAKMSNAMDRLSSGKRINNASDDAAGLAIATRMR |
| Bacillus | ARESGLGVAANNTQDGISLIRTADSAMNSVSNILLRMRDLANQ |
| thuringiensis | SANGTNTNENQAALNKEFDALKEQIDYISTNTEFNDKKLLDGS |
| serovar galleriae | NKTIAVQTLDNADTSKQININLSNVSTKELGLSTLSIGTDKVEKT |
| | VYDATTKAFADLGAKTGTDKAAFAADVTAAMKEFDKVKPFM |
| | SADDVKKIETKLEDYNKANDAGAEAAAQALGKEFATLTKLETT |
| | DLKANASGAIASIDTALKNIASNRATLGATLNRLDFNVNNLKSQ |
| | SSSMASAASQIEDADMAKEMSEMTKFKILNEAGISMLSQANQT |
| | PQMVSKLLQ |
| Flagellin N-terminal | MRINTNINSMIRTQEYMIRQNQAKMSNAMDRLSSGKRINNASDD |
| helical region | AAGLAIATRMRARESGLSVAANNTQDGMSLIRTADSAMNSVSN |
| SEQ ID NO: 30 | ILLRMRDLSNQSANGTNTDENQQALNKEFAALKDQIDYISKNTE |
| Bacillus | FNDKKLLDGSNKSIAIQTLDNADTTKQINIDLSNVSTDTLNISGL |
| weihenstephanensis | TINGKKDITVTISDKDIANAATDIGKATSAQQGLADLTDTTPAVP |
| | DTPAVIGTGTAGNPQFPAVKGTPEIPGSSPAEIAKAVDDFKQAF |
| | NKVKGLMSDSAVSAMEQKFATFEKDKSLANAKDIGTAFSAPIA |
| | GNITKGEQNASGAIKSIDAALEKIASNRATLGATLNRLDFNVNN |
| | LKSQSSSMASAASQIEDADMAKEMSEMTKFKILNEAGISMLSQ |
| | ANQTPQMVSKLLQ |
| Flagellin | MTGITINLEIDFFAYYRFSICRKVNIKKWGFLNMRINTNINSMRT |
| SEQ ID NO: 31 | QEYMRQNQAKMSNAMDRLSSGKRINNASDDAAGLAIATRMR |
| Bacillus | ARESGLGVAANNTQDGMSLIRTADSALNSVSNILLRMRDIANQ |
| thuringiensis | SANGTNTGDNQKALDKEFSALKEQIDYISKNTEFNDKKLLNGD |
| serovar ostriniae | NKSIAIQTLDNADTAKQININLADSSTKALNIDTLSIAGTTDKTIT |
| | ITAKDLTDNKTTLDALKTAKDDLAKLDDKSDQATIDKAVDAFK |
| | TAFNNVDKNLLSDKAIEGITEKMTAFDGTHTAAAAIGAAYTEPT |
| | AADIKKSAPNASGAIKSIDAALETIASNRATLGATLNRLDFNVN |
| | NLKSQSSSMASAASQIEDADMAKEMSEMTKFKILNEAGISMLS |
| | QANQTPQMVSKLLQ |
| Flagellin | MRIGTNVLSMNARQSLYENEKRMNVAMEHLATGKKLNHASD |
| SEQ ID NO: 32 | NPANVAIVTRMHARASGMRVAIRNNEDALSMLRTAEATLQTV |
| Bacillus | ANILQRMRDLAVQSSNDTNSNKNRDSLNKEFQSLTEQISYIGET |
| thuringiensis | TEFNDLSVFDGQNRPVTLDDIGHTVNVTKHISPSPTQHDIKISTE |
| | QEARAAIRKIEEALQNVLLHRADLGAMINRLQFNIENLNSQSMA |
| | LTDAASRIEDADMAQEMSDFLKFKLLSEVALSMVSQANQIPQM |
| | VSELLQS |
| Flagellin | MRINTNINSMRTQEYMRQNQTKMSNAMDRLSSGKRINNASDD |
| SEQ ID NO: 33 | AAGLAIATRMRARENGLGVAANNTQDGMSLIRTADSAMNSVS |
| Bacillus | NILLRMRDLANQSANGTNTDDNQKALDKEFSALKEQIDYISKN |
| thuringiensis | TEFNDKKLLNGENKTIAIQTLDNADTTKQININLADSSTSALQID |
| | KLTISGKTTDTTKTQTITVTDDEIKAAKTDIDEFNDAKKALADL |
| | KAESAPSKGDGSSDDEIKEAVSNFKKSFEKIQKFMNDSDIKTVQ |
| | TEIEKFDAAAPALDKAKGMGIAFTSAMDPKAGTITKAATRQNA |
| | SDAIKSIDAALETIASNRATLGATLNRLDFNVNNLKSQSSSMAA |
| | AASQIEDADMAKEMSEMTKFKILNEAGISMLSQANQTPQMVSK |
| | LLQ |
| Flagellin | MTGITINLEIDFFAYYRFSICRKVNIKKWGFLIMRINTNINSMRTQ |
| SEQ ID NO: 34 | EYMRQNQTKMSNAMDRLSSGKRINNASDDAAGLAIATRMRAR |
| Bacillus | ENGLGVAANNTQDGMSLIRTADSAMNSVSNILLRMRDLANQS |
| thuringiensis | ANGTNTDDNQKALDKEFSALKEQIDYISKNTEFNDKKLLNGEN |
| serovar | KTIAIQTLDNADTTKQININLADSSTSALQIDKLTISGKTTDTTKT |
| pondicheriensis | QTITVTDDEIKAAKTDIDEFNDAKKALADLKAESAPSKGDGSSD |
| | DEIKEAVSNFKKSFEKIQKFMNDSDIKTVQTEIEKFDAAAPALD |
| | KAKGMGIAFTSAMDPKAGTITKAATRQNASDAIKSIDAALETIA |
| | SNRATLGATLNRLDFNVNNLKSQSSSMAAAASQIEDADMAKE |
| | MSEMTKFKILNEAGISMLSQANQTPQMVSKLLQ |
| Flagellin B | MSIMRIGTNVLSMNARQSLYENEKRMNVAMEHLATGKKLNHA |
| SEQ ID NO: 35 | SDNPANIVIVTRMYARASGMRVAIRNNEDAISMLRTAEAALQT |
| Bacillus | VTNILQHMRDFAIQSANGTNSNTNRDSLNKEFQSLTEPIGYIGET |
| thuringiensis | TEFNDLSVFDGQNRPITLDDIGHTINMTKHIPPSPTQHDIKISTEQ |
| serovar Berliner | EARAAIRKIEEALQNVSLHRADLGSMINRLQFNIENLNSQSMALI |
| | DTASQVEDADMAQEISDFLKFKLLTAVALSVVSQANQIPQIVSK |
| | LLQS |
| Flagellin A | MARITINLEIDFFAYYRFSICRKVNIKKWGFLNMRINTNINSMRT |
| SEQ ID NO: 36 | QDYMRQNQAKMSNAMDRLSSGKRINNASDDAAGLAIATRMR |
| Bacillus | ARESGLGVAANNTQDGMSLIRTADSAMNSVSNILLRMRDISNQ |
| thuringiensis | SANGTNTDKNQSALDKEFAALKDQIDYISKNTEFNDQKLLDGS |
| serovar Berliner | KKSIAIQTLDNADTNKQIDIQLSNVSTKELKLDTLSIEGSSSKTFT |
| | ITADDMLAVGTANATAKAKAGTLKGLNVTTGDLTAAKTDVQD |
| | FRAAFDKVKGFMGSTEVTNIEKALTKFDGDQSLANAKAIGDAL |
| | TSDLATTIAKDQTYSKNVSNASSAIASIDAALESIASNRATLGAT |
| | LNRLDFNVNNLKSQSSSMASAASQIEDADMAKEMSEMTKFKIL |
| | NEAGISMLSQANQTPQMVSKLLQ |
| Flagellin | MRIGTNVLSMNARQSLYENEKRMNVAMEHLATGKKLNHASN |
| SEQ ID NO: 37 | NPANVAIVTRMHARASGMRVAIRNNEDAISMLRTAEAALQTVT |
| Bacillus cereus | NVLQRMRDVAVQSANGTNSSKNRDSLNKEFQSLTEQIGYIDET |
| strain Q1 | TEFNDLSVFDGQNRTVTLDDIGHTVNVTKHIPPSPTQHDINISTE |
| | QEARAAIRKIEEALQNVSLHRADLGAMINRLQFNIENLNSQSTA |
| | LTDAASRIEDADMAQEMSDFLKFKLLTEVALSMVSQANQIPQM |
| | VSKLLQS |
| Flagellin | MRINTNINSMRTQEYMRQNQAKMSNAMDRLSSGKRINNASDD |
| SEQ ID NO: 38 | AAGLAIATRMRARESGLSVAADNTQNGMSLIRTADSAMNSVSN |
| Bacillus cereus | ILLRMRDIANQSANGTNTDKNQVALQKEFAALKEQITYIADNT |
| strain Q1 | QFNDKNLLNGNQTINTQTLDSHDSTKQIGIDLKSATLEALGIKDL |
| | TVGAVGSTEAKNYVDAKEALAKNVAANEFIDAKKALDGNAIA |
| | KGYVEAKTAFDDAKPEVKALVSNYTDALAALAKDDTNDDLK |
| | KDVADTKALMDANTVAKTYFEAKTAHDGADQAIKDIVTTYDS |
| | KLGALDDAANKAISDFDKAKAAFDESPAAKELVKTMDDAKQA |
| | ATQNNTANAYLVAKAAAELAPNDADKKAELENATKALEKDD |
| | TAKGLVKTYENAKEALNPANAMPLDAVKQIDAALKTVADNRA |
| | TLGATLNRLDFNVNNLKSQSSAMAASASQIEDADMAKEMSEM |
| | TKFKILNEAGISMLSQANQTPQMVSKLLQ |
| Flagellin | MRIGTNFLSMNARQSLYENEKRMNVAMEHLATGKKLNHASDN |
| SEQ ID NO: 39 | PANIAIVTRMHARANGMRVAIRNNEDAISMLRTAEAALQTVMN |
| Bacillus | ILQRMRDLAIQSANSTNSNKNRDSLNKEFQSLTEQISYIGETTEF |
| thuringiensis | NDLSVFDGQNRPVTLDDIGHTVHISKSIPPPSPTQHDIKISTEQEA |
| serovar morrisoni | RAAILKIEEALQSVSLHRADLGAMINRLHFNIENLNSQSMALTD |
| | AASRIEDADMAQEMSDFLKFKLLTEVALSMVSQANQIPQMVSK |
| | LLQS |
| Flagellin | MRINTNINSMRTQEYMRQNQTKMSNAMDRLSSGKRINNASDD |
| SEQ ID NO: 40 | AAGLAIATRMRARENGLGVAANNTQDGMSLIRTADSALNSVS |
| Bacillus | NILLRMRDIANQSANGTNTSDNQKALDKEFSALKEQIDYISKNT |
| thuringiensis | EFNDKKLLNGDNKSIAIQTLDNADTTKQININLADSSTSALNIDK |
| serovar | LSIEGTGNKTITLTAADIAKDKTNIDAVGTAKTALAGLTGTPAA |
| neoleonensis | AAINSAVADFKTAFAKADKNLMSDAQIKSVTDAITAFEADATP |
| | DLTKAKAIGTAYTAPAAGDITKASPNASEAIKSIDAALDTIASNR |
| | ATLGATLNRLDFNVNNLKSQSSSMASAASQIEDADMAKEMSE |
| | MTKFKILNEAGISMLSQANQTPQMVSKLLQ |
| Flagellin | MTGITINLEIDFFAYYRFSICRKVNIKKWGFLNMRINTNINSMRT |
| SEQ ID NO: 41 | QEYMRQNQAKMSNAMDRLSSGKRINNASDDAAGLAIATRMR |
| Bacillus | ARESGLGVAANNTQDGMSLIRTADSALNSVSNILLRMRDIANQ |
| thuringiensis | SANGTNTGDNQKALDKEFSALKEQIDYISKNTEFNDKKLLNGD |
| serovar morrisoni | NKSIAIQTLDNADTAKQININLADSSTKALNIDTLSIAGTTDKTIT |
| | ITAKDLTDNKATLDALKTAKADLAKLDDKSDQATIDKAVDAF |
| | KTAFNNVDKNLLSDKAIEGITDKMTAFDGTHTAAAAIGTAYTE |
| | PTAGDITKSAPNASGAIKSIDAALETIASNRATLGATLNRLDFNV |
| | NNLKSQSSSMASAASQIEDADMAKEMSEMTKFKILNEAGISML |
| | SQANQTPQMVSKLLQ |
| Flagellin | MRINTNINSMRTQEYMRQNQAKMSNAMDRLSSGKRINNASDD |
| SEQ ID NO: 42 | AAGLAIATRMRARESGLGVAANNTQDGMSLIRTADSALNSVSN |
| Bacillus | ILLRMRDIANQSANGTNTGDNQKALDKEFSALKEQIDYISKNTE |
| thuringiensis | FNDKKLLNGDNKSIAIQTLDNADTAKQININLADSSTKALNIDTL |
| serovar morrisoni | SIAGTTDKTITITAKDLTDNKATLDALKTAKADLAKLDDKSDQ |
| | ATIDKAVDAFKTAFNNVDKNLLSDKAIEGITDKMTAFDGTHTA |
| | AAAIGTAYTEPTAGDITKSAPNASGAIKSIDAALETIASNRATLG |
| | ATLNRLDFNVNNLKSQSSSMASAASQIEDADMAKEMSEMTKF |
| | KILNEAGISMLSQANQTPQMVSKLLQ |
| Flagellin | MRINTNINSMRTQEYMRQNQAKMSNAMDRLSSGKRINNASDD |
| SEQ ID NO: 43 | AAGLAIATRMRARESGLGVAANNTQDGMSLIRTADSAMNSVS |
| Bacillus | NILLRMRDIANQSANGTNTNGNQAALNKEFDALKQQINYISTNT |
| thuringiensis | EFNDKKLLDGSNKTIAIQTLDNADTSKKIDIQLADVSTKSLNIDK |
| serovar jegathesan | LKIGGVSKETTDAVGDTFTKLSTTATTDMGALKIEVEAAMKEF |
| | DKVKGAMSAEDAKAVTDKLDAFNTAAAATNDAATIAAAKAL |
| | GAAFDKTKVEMADPNASVAAIDSALENIASNRATLGATLNRLD |
| | FNVNNLKSQQSSMASAASQIEDADMAKEMSEMTKFKILNEAGI |
| | SMLSQANQTPQMVSKLLQ |
| Flagellin | MRINTNINSMRTQEYMRQNQAKMSNAMDRLSSGKRINNASDD |
| SEQ ID NO: 44 | AAGLAIATRMRARESGLGVAANNTQDGMALIRTADSAMNSVS |
| Bacillus cereus stain | NILLRMRDIANQSANGTNTDKNQAALQKEFGELQKQIDYIAGN |
| ATCC 10987 | TQFNDKNLLDGSNPSISIQTLDSADQSKQISIDLKSATLEALGIKD |
| | LTVGATENTLAKATITAKDAFDAAKDASDAAKKEIDAAAKDTP |
| | SKNDAQLAKEYIEAKATLATLKPTDATYAAKAAELDAATTALN |
| | DNAKVLVDGYEKKLTTTKTKEAEYTAAKEQSTKSTAAADLVT |
| | KYETAKSNALGNDIAKEYLEAKTAYEANKNDISSKSRFEAAETE |
| | LNKDITANKAAKVLVETYEKAKTAGTTEKSLVAVDKIDEALKT |
| | IADNRATLGATLNRLDFNVNNLKSQSASMASAASQIEDADMAK |
| | EMSEMTKFKILNEAGISMLSQANQTPQMVSKLLQ |
| Flagellin | MTGITINLEIDFFAYYRFSICRKVNIKKWGFLIMRINTNINSMRTQ |
| SEQ ID NO: 45 | EYMRQNQAKMSNAMDRLSSGKRINNASDDAAGLAIATRMRAR |
| Bacillus | ESGLGVAANNTQDGMSLIRTADSAMNSVSNILLRMRDLANQSA |
| thuringiensis | NGTNTNENQAALNKEFDALKEQINYISTNTEFNDKKLLDGSNK |
| serovar monterrey | TIAIQTLDNADTSKKIDIKLADVSTESLKIDKLKIGGVSKETTDA |
| | VSETFTKLSTTKTTDKDALKAEVEAAMKEFDKVKGAMSTEDA |
| | KAVTDKLGLFNTAAAGTDDTAIATAAKNLGAAFDKTKVNMAD |
| | PNASVAAIDSALENIASNRATLGATLNRLDFNVNNLKSQQSSM |
| | ASAASQIEDADMAKEMSEMTKFKILNEAGISMLSQANQTPQMV |
| | SKLLQ |
| Flagellin | MRIGTNVLSLNARQSLYENEKRMNVAMEHLATGKKLNNASDN |
| SEQ ID NO: 46 | PANIAIVTRMHARASSMRVAIRNNEDAISMLRTAEAALQTVTN |
| Bacillus cereus | VLQRMRDLAVQSANDTNSNKNRDSLNKEFQSLTEQIGYIDETT |
| strain NC 7401 | DFNDLSVFDGQNRTVTLDDIGHTVNVTKHIPPSPTQHDINISTEQ |
| | EARAAIRKIEEALQNVSLHRADLGAMINRLQFNIENLNSQSTAL |
| | TDAASRIEDADMAQEMSDFLKFKLLTEVALSMVSQANQIPQMV |
| | SKLLQS |
| Flagellin | MRINTNINSMRTQEYMRQNQAKMSNAMDRLSSGKRINNASDD |
| SEQ ID NO: 47 | AAGLAIATRMRARESGLGVASNNTQDGMSLIRTADSALNSVSN |
| Bacillus cereus | ILLRMRDLANQSANGTNTNENKAAMQKEFGELKEQIKYIAENT |
| strain NC 7401 | QFNDQHLLNADKGITKEIAIQTLDSDSDSKQIKIKLQGSSLEALDI |
| | KDLQIGNTELAQKDLDLLNATMDRLDATVPGTRDVDVQAAKD |
| | AFDKVKGFYTNSDSVKAIERAFEDYATASTAGTAKADAATAIK |
| | AAFDLAANKVGKPATGGAQGSANSLGAITKIDAALKTVADNR |
| | ATLGATLNRLDFNVNNLKSQASSMAAAASQVEDADMAKEMSE |
| | MTKFKILNEAGISMLSQANQTPQMVSKLLQ |
| Flagellin (A-type) | MRINTNINSLRTQEYMRQNQAKMSNSMDRLSSGKRINNASDDA |
| SEQ ID NO: 48 | AGLAIATRMRARESGLNVAANNTQDGMSLIRTADSALGSVSNI |
| Bacillus cereus | LLRMRDLANQSANGTNTSDNQAAMQKEFAELQKQITYIADNT |
| strain AH820 | QFNDKNLLQSNSSINIQTLDSSDGNQQIGIELKSASLKSLGIEDLA |
| | IGASVNPLAKATVEASEAYDKAKADTAAFAKSIADTAATGTGA |
| | AKADAAAVDAYIKEADPTAKGNLYTGLTADQKKLADEHNTLK |
| | AAEDGKKAELTMATTKSTADGTAKGLVDAYDNAKSDAMNDP |
| | KAKAYLEAKMAYEKDTSNVANKQKLDSTKEAMEKDPASKDL |
| | VVKLDAAKAAATNGTPLDAVSKIDAALKTVADNRATLGATLN |
| | RLDFNVNNLKSQSSSMASAASQIEDADMAKEMSEMTKFKILNE |
| | AGISMLSQANQTPQMVSKLLQ |
| Flagellin | MRINTNINSMRTQEYMRQNQAKMSNAMDRLSSGKRINNASDD |
| SEQ ID NO: 49 | AAGLAIATRMRARESGLGVASNNTQDGMSLIRTADSALNSVSN |
| Bacillus cereus | ILLRMRDLANQSANGTNTNENKAAMQKEFGELKEQIKYIAENT |
| AH187 | QFNDQHLLNADKGITKEIAIQTLDSDSDSKQIKIKLQGSSLEALDI |
| | KDLQIGNTELAQKDLDLLNATMDRLDATVPGTRDVDVQAAKD |
| | AFDKVKGFYTNSDSVKAIERAFEDYATASTAGTAKADAATAIK |
| | AAFDLAANKVGKPATGGAQGSANSLGAITKIDAALKTVADNR |
| | ATLGATLNRLDFNVNNLKSQASSMAAAASQVEDADMAKEMSE |
| | MTKFKILNEAGISMLSQANQTPQMVSKLLQ |
| Flagellin | MDFFAYYRFSICRKVNIKKWGFFYMRINTNINSMRTQEYMRQN |
| SEQ ID NO: 50 | QAKMSNAMDRLSSGKRINNASDDAAGLAIATRMRARESGLGV |
| Bacillus cereus | ASNNTQDGMSLIRTADSALNSVSNILLRMRDLANQSANGTNTN |
| | ENKAAMQKEFGELKEQIKYIAENTQFNDQHLLNADKGITKEIAI |
| | QTLDSDSDSKQIKIKLQGSSLEALDIKDLQIGNTELAQKDLDLLN |
| | ATMDRLDATVPGTRDVDVQAAKDAFDKVKGFYTNSDSVKAIE |
| | RAFEDYATASTAGTAKADAATAIKAAFDLAANKVGKPATGGA |
| | QGSANSLGAITKIDAALKTVADNRATLGATLNRLDFNVNNLKS |
| | QASSMAAAASQVEDADMAKEMSEMTKFKILNEAGISMLSQAN |
| | QTPQMVSKLLQ |
| Flagellin protein F1a | MRINTNINSMRTQEYMRQNQAKMSNAMDRLSSGKRINNASDD |
| SEQ ID NO: 51 | AAGLAIATRMRARESGLGVAANNTQDGMSLIRTADSALNSVSN |
| Bacillus cereus | ILLRMRDIANQSANGTNTGDNQKALDKEFSALKEQIDYISKNTE |
| | FNDKKLLNGENTSIAIQTLDSADTAKQININLADSSTSALLIDKLS |
| | ISGAGAGTALAGVATADINAAGTKQAALSGLTGSKTTDELDDA |
| | VKEFKTEFDKVKSGLSAENADKITAAMDKYTNNKTLDNAKAIG |
| | DLYKTMAPADSTVVGTAGTKGQALIDLNATATGDTAQKRQVA |
| | VDAFKDDFDKIKGGLNAQDAAKVTAALDKFNKADGSGNTLEN |
| | AQEIGKVFAEVAAGSTKSNASDAIKSIDKALETIASNRATLGATL |
| | NRLDFNVNNLKSQSSSMASAASQIEDADMAKEMSEMTKFKILN |
| | EAGISMLSQANQTPQMVSKLLQ |
| Flagellin | MRINTNINSMRTQEYMRQNQTKMSNAMDRLSSGKRINNASDD |
| SEQ ID NO: 52 | AAGLAIATRMRSREGGLNVAARNTEDGMSLIRTADSALNSVSN |
| Bacillus | ILLRMRDLANQSASETNTSKNQAAMQKEFDQLKEQIQYIADNT |
| thuringiensis | EFNDKKLLDGSNSTINTQTLDSHDKNKQITISLDSASLKNLDITDL |
| Strain HD-771 | AIGSNTVNKNDLDTLNNSMKRLETAAADAAVQAQDVTDAKN |
| [51] | AFNKVKSGYTPAEVEKMEDAFKAYDKVVADPAKTDALLKAA |
| | AEKINTEFKTLTAPTATAFDPSSSVEKIDKAIETIASSRATLGATL |
| | NRLDFNVTNLKSQENSMAASASQIEDADMAKEMSEMTKFKILN |
| | EAGISMLSQANQTPQMVSKLLQ |
| Flagellin | MRINTNINSMRTQEYMRQNQTKMSNAMDRLSSGKRINNASDD |
| SEQ ID NO: 53 | AAGLAIATRMRSREGGLNVAARNTEDGMSLIRTADSALNSVSN |
| Bacillus | ILLRMRDLANQSASETNTSKNQAAMQKEFDQLKEQIQYIADNT |
| thuringiensis | EFNDKKLLDGSNSTINTQTLDSHDKNKQITISLDSASLKNLDITDL |
| serovar sotto | AIGSNTVNKNDLDTLNNSMKRLETAAADAAVQAQDVTDAKN |
| [52] | AFNKVKSGYTPAEVEKMEDAFKAYDKVVADPAKTDALLKAA |
| | AEKINTEFKTLTAPTATAFDPSSSVEKIDKAIETIASSRATLGATL |
| | NRLDFNVTNLKSQENSMAASASQIEDADMAKEMSEMTKFKILN |
| | EAGISMLSQANQTPQMVSKLLQ |
| Flagellin | MGVLNMRINTNINSMRTQEYMRQNQAKMSNAMDRLSSGKRIN |
| SEQ ID NO: 54 | NASDDAAGLAIATRMRARENGLGVAANNTQDGMSLIRTADSA |
| Bacillus | LNSVSNILLRMRDIANQSANGTNTGDNQKALDKEFSALKEQID |
| thuringiensis | YISKNTEFNDKKLLNGDNKSIAIQTLDNADTSKQINIDLANTSTS |
| serovar Novosibirsk | SLKIDKLSIEGKGNQTIAITAADIAKDTNIAALTSAQGKLAALTG |
| | TPAPAALTTAVDEFKAAFEKVDKNLMSDTQITGIENAIKAYDG |
| | ATTKTLALAQAVGTAYTAPTPGDITKELPNASSSIKSIDAALETI |
| | ASNRATLGATLNRLDFNVNNLKSQASSMASAASQIEDADMAK |
| | EMSEMTKFKILNEAGISMLSQANQTPQMVSKLLQ |
| Flagellin | MGVLNMRINTNINSMRTQEYMRQNQAKMSNAMDRLSSGKRIN |
| SEQ ID NO: 55 | NASDDAAGLAIATRMRARESGLGVAANNTQDGISLIRTADSAM |
| Bacillus | NSVSNILLRMRDLANQSANGTNTSENQAALDKEFGALKEQINYI |
| thuringiensis | STNTEFNDKKLLDGSNETIAIQTLDNADEGKKIDIKLANVSTDSL |
| serovar londrina | KIDKLTIGGAAQKTVDAVADKFNALKTTTTTDKAAIQTEVDAV |
| | MKEFDKVKGSMSAEDAKVITDKLKDYNDAADTDTAKATAAK |
| | DLGAAFDKTKVNIANPNAAVAAIDSALENIASNRATLGATLNR |
| | LDFNVNNLKSQSSSMASAASQIEDADMAKEMSEMTKFKILNEA |
| | GISMLSQANQTPQMVSKLLQ |
| Flagellin | MRIGTNVLSMNARQSLYENEKRMNVAMEHLATGKKLNHASN |
| SEQ ID NO: 56 | NPANIAIVTRMHARASGMRVAIRNNEDALSMLRTAEAALQTVT |
| Bacillus cereus | NILQRMRDLAVQSANVTNSNKNRNSLNKEFQSLTEQISYIGETT |
| strain E3 3L | EFNDLSVFDGQNRPVTLDDIGYTVNVTKHTPPSPTQHDIKISTEQ |
| | EARAAIRKIEEALQNVSLHRADLGSMMNRLQFNIENLNSQSMA |
| | LTDAASRIEDADMAQEMSDFLKFKLLTEVALSMVSQANQIPQM |
| | VSKLLQS |
| Flagellin | MRINTNINSMRTQEYMRQNQAKMSTAMDRLSSGKRINNASDD |
| SEQ ID NO: 57 | AAGLAIATRMRARESGLGVAANNTQDGISLIRTADSAMNSVSNI |
| Bacillus cereus | LLRMRDLANQSANGTNTDKNQGALDKEFAALKEQIDYISKNTE |
| strain E3 3L | FNDKKLLDGSNKAIAIQTLDSDDKGKQIDISLSDTSTTALKINNL |
| | SIAANGLGIGSGKELVGVADNTIANASAEALKKLDGTTGDTDV |
| | KRSNAVKAFTDQYKDLKVAMNAKDVETIDAAIKKFEGANTLE |
| | NAQAIGAAFEGAAKATLTTDINNATLTSKALSDLDTDSTTETRK |
| | AAMKDFVAAFDKVKGSMNSSDVTKISDAIDRFSKTDDSGNTLE |
| | AARAIGDAFKAATTNGKTSTATDANSAIKAIDEALETIASNRAT |
| | LGATLNRLDFNVNNLKNQASSMASAASQVEDADMAKEMSEM |
| | TKFKILNEAGISMLSQANQTPQMVSKLLQ |
| Flagellin | MRINTNINSMRTQEYMRQNQAKMSTAMDRLSSGKRINNASDD |
| SEQ ID NO: 58 | AAGLAIATRMRARESGLGVAANNTQDGISLIRTADSAMNSVSNI |
| Bacillus cereus | LLRMRDLANQSANGTNTDKNQAALDKEFNALKEQIDYISKNTE |
| strain FRI-35 | FNDKKLLDGSNKSIAVQTLDNADTSKQININLSNTSTKALEINSL |
| | TISGTTPIAGKNETSKITAEQMTAASDALEKFKTAQEGLANLTEP |
| | TKGSDGKPEAGTGSSNEDIVKAVKAFKEAFKNIQPLMSDTDITT |
| | VQNKIDLFDEDAPDLSAAKLIGTTFEESMKPVADKEITKAAVKP |
| | NASDAIAAIDAALTKVADNRATLGATLNRLDFNVNNLKSQASS |
| | MASAASQVEDADMAKEMSEMTKFKILNEAGISMLSQANQTPQ |
| | MVSKLLQ |
| Flagellin | MRIGTNVLSLNARQSLYENEKRMNVAMEHLATGKKLNNASDN |
| SEQ ID NO: 59 | PANIAIVTRMHARASGMRVAIRNNEDAISMLRTAEAALQTVTN |
| Bacillus cereus | VLQRMRDLAVQSANGTNSNKNRDSLNKEFQSLTEQIGYIDETT |
| strain FRI-35 | EFNNLSVFDGQNRPVTLDDIGHTVNVTKHIPPFPTQHDINISTEQ |
| | EARAAIRKIEEALQNVSLHRADLGAMINRLQFNIENLNSQSTAL |
| | TDAASRIEDADMAQEMSDFLKFKLLTEVALSMVSQANQVPQM |
| | VSKLLQS |
| Flagellin | MRINTNINSMRTQEYMRQNQAKMSNAMDRLSSGKRINNASDD |
| SEQ ID NO: 60 | AAGLAIATRMRAHESGLSVAARNTSDGISLIRTADSALQSVSNIL |
| Bacillus | LRMRDIANQTANGTNKDTDIEALGKEFAALKEQITYVSDNTKF |
| thuringiensis | NGRELLKGGDDINIQTYDGSDESQQIKIKISELDLSSLDTGEVTD |
| | SDTARGTVSTLDDAITNIASKRAELGATLNRLDYNTQNVNSEA |
| | ASMAASASQIEDADMAKEMSEMTKFKILSEAGISMLSQANQTP |
| | QMVSKLLQ |
| Flagellin | MRINTNINSMRTQEYMRQNQAKMSNAMDRLSSGKRINNASDD |
| SEQ ID NO: 61 | AAGLAIATRMRAHESGLSVAARNTSDGISLIRTADSALQSVSNIL |
| Bacillus cereus | LRMRDIANQTANGTNKDTDIEALGKEFAALKEQITYVSDNTKF |
| strain ATCC 4342 | NGRELLKGGDDINIQTYDGSDESQQIKIKISELDLSSLDTGEVTD |
| | SDTARGTVSTLDDAITNIASKRAELGATLNRLDYNTQNVNSEA |
| | ASMAASASQIEDADMAKEMSEMTKFKILSEAGISMLSQANQTP |
| | QMVSKLLQ |
| Flagellin | MRIGTNFLSMNARQSLYENEKRMNVAMEHLATGKKLNHASDN |
| SEQ ID NO: 62 | PANIAIVTRMHARANGMRVAIRNNEDAISMLRTAEAALQTVMN |
| Bacillus | ILQRMRDLAIQSANSTNSNKNRDSLNKEFQSLTEQISYIGETTEF |
| thuringiensis | NDLSVFDGQNRPVTLDDIGHTVHISKSIPPPSPTQHDIKISTEQEA |
| | RAAILKIEEALQSVSLHRADLGAMINRLHFNIENLNSQSMALTD |
| | AASRIEDADMAQEMSDFLKFKLLTEVALSMVSQANQIPQMVSK |
| | LLQS |
| Flagellin | MRINTNINSMRTQEYMRQNQAKMSNAMDRLSSGKRINNASDD |
| SEQ ID NO: 63 | AAGLAIATRMRARESGLGVAANNTQDGMSLIRTADSALNSVSN |
| Bacillus | ILLRMRDIANQSANGTNTGDNQKALDKEFSALKEQIDYISKNTE |
| thuringiensis | FNDKKLLNGDNKSIAIQTLDNADTAKQININLADSSTKALNIDTL |
| | SIAGTTDKTITITAKDLTDNKATLDALKTAKADLAKLDDKSDQ |
| | ATIDKAVDAFKTAFNNVDKNLLSDKAIEGITDKMTAFDGTHTA |
| | AAAIGTAYTEPTAGDITKSAPNASGAIKSIDAALETIASNRATLG |
| | ATLNRLDFNVNNLKSQSSSMASAASQIEDADMAKEMSEMTKF |
| | KILNEAGISMLSQANQTPQMVSKLLQ |
| Flagellin | MRINHNITALNTYRQFNNANNAQAKSMEKLSSGQRINSASDDA |
| SEQ ID NO: 64 | AGLAISEKMRGQIRGLDQASRNAQDGVSLIQTAEGALNETHDIL |
| Bacillus aryabhattai | QRMRELVVQAGNGTNKTEDLDAIQDEIGSLIEEIGGETDSKGISD |
| | RAQFNGRNLLDGSLDITLQVGANAGQQVNLKIGDMSAGALGA |
| | DTDSDGAADAFVNSINVKDFATTSFDDQLAIIDGAINQVSEQRS |
| | GLGATQNRLDHTINNLSTSSENLTASESRIRDVDYALAA |
| Flagellin | MRINTNINSMRTQEYMRQNQDKMNTSMNRLSSGKQINSASDD |
| SEQ ID NO: 65 | AAGLAIATRMRAKEGGLNVGAKNTQDGMSALRTMDSALNSVS |
| Bacillus | NILLRMRDLATQSATGTNQGNDRESLDLEFQQLTEEITHIAEKT |
| manliponensis | NFNGNALLSGSGSAINVQLSDAAEDKLTIAAIDATASTLLKGAV |
| | DVKTEDKADAAITKIDQAIQDIADNRATYGSQLNRLDHNLNNV |
| | NSQATNMAAAASQIEDADMAKEMSEMTKFKILSEAGVSMLSQ |
| | ANQTPQMVSKLLQ |
| Flagellin | MRIGSWTATGMSIVNEIMNRNAVNAASKSMLRLSSGYRINSAAD |
| SEQ ID NO: 66 | DAAGLAISEKMRGQIRGLTMASKNIMDGVSLIQTAEGALNETH |
| Lysinibacillus sp. | AIVQRMRELAVQAATDTNTDDDRAKLDLEFQELKKEIDRISTDT |
| strain BF-4 | EFNTRTLLNGDYKDNGLKIQVGANSGQAIEVKIGDAGLAGIGLS |
| | TESIATREGANAALGKLDEATKNVSMERSRLGAYQNRLEHAYN |
| | VAENTAINLQDAESRIRDVDIAKEMMNMVKSQILAQVGQQVLA |
| | MHMQQAQGILRLLG |
| Flagellin | MKIGSWTATGMSIVNHMNRNWNAASKSMLRLSSGYRINSAAD |
| SEQ ID NO: 67 | DAAGLAISEKMRGQIRGLTMASKNIMDGVSLIQTAEGALNETH |
| Lysinibacillus sp. | AIVQRMRELAVQAATDTNTDDDRAKLDLEFQELKKEIDRISTDT |
| strain 13S34_air | AFNTRTLLNGDYKDNGLKIQVGANSGQAIEVKIGDAGLAGIGLS |
| | TESIATREGANAALGKLDEATKNVSMERSRLGAYQNRLEHAYN |
| | VAENTAINLQDAESRIRDVDIAKEMMHMVKSQILAQVGQQVLA |
| | MHIQQAQGILRLLG |
| Flagellin | MIISHNLTALNTMNKLKQKDLAVSKSLGKLSSGLRINGASDDA |
| SEQ ID NO: 68 | AGLAISEKMRGQIRGLNQASRNIQDGISLIQVADGAMQEIHSML |
| Paenibacillus sp. | QRMNELAVQASNGTYSGSDRLNIQSEVEQLIEEIDEIAGNTGFN |
| strain HW567 | GIKLLNGNNEKTEKTEKTGSVVSVNNPPNNKLITISSPVGTSVSE |
| | ILNNLLTVFNEAKNGQVGDSDSKRVSSKFTLSINNDELSIVCDTG |
| | DGFLLSGGSPNLFYQGYIGGSYKYKFTEFINENDFINIMDIGGAN |
| | GGDTLKFNFSSISKEPEEQKEQKGLTLQIGANSGETLNIKLPNVT |
| | TSAIGISSIDVSTIPNAESSLSSISAAIDKVSAERARMGAYQNRLE |
| | HSRNNVVTYAENLTAAESRIRDVDMAKEMMELMKNQIFTQAG |
| | QAMLLQTNTQPQAILQLLK |
| Flagellin | MRINTNINSMRTQEYMRQNQAKMSNAMDRLSSGKRINNASDD |
| SEQ ID NO: 69 | AAGLAIATRMRARESGLGVAANNTQDGMSLIRTADSAMNSVS |
| Bacillus anthracis | NILLRMRDLANQSANGTNTKENQDALDKEFGALKEQIDYISKN |
| | TEFNDKKLLNGDNKSIAIQTLDNADTAKQININLADSSTKALNID |
| | SLTISGSKDATITITAEDITAASAEITAAKGARTALANLKDTPADP |
| | TKDPAASTPAEIKAAVDDFKGKFEKIKGLMNDTDVKAVEEKIK |
| | EFETTSTLAKAQAIGTAFTTGMEPKAGNITKNVPAASSSIKAIDS |
| | ALETIASNRATLGATLNRLDFNVNNLKSQSSAMASAASQIEDAD |
| | MAKEMSEMTKFKILNEAGISMLSQANQTPQMVSKLLQ |
| Flagellin | MQKSQYKKMGVLKMRINTNINSMRTQEYMRQNQDKMNVSM |
| SEQ ID NO: 70 | NRLSSGKRINSAADDAAGLAIATRMRARQSGLEKASQNTQDG |
| Bacillus anthracis | MSLIRTAESAMNSVSNILTRMRDIAVQSSNGTNTAENQSALQKE |
| | FAELQEQIDYIAKNTEFNDKNLLAGTGAVTIGSTSISGAEISIETL |
| | DSSATNQQITIKLANTTAEKLGIDATTSNISISGAASALAAISALN |
| | TALNTVAGNRATLGATLNRLDRNVENLNNQATNMASAASQIE |
| | DADMAKEMSEMTKFKILNEAGISMLSQANQTPQMVSKLLQ |
| Flagellin | MRINTNINSMRTQEYMRQNQDKMNVSMNRLSSGKRINSAADD |
| SEQ ID NO: 71 | AAGLAIATRMRARQSGLEKASQNTQDGMSLIRTAESAMNSVSN |
| Bacillus anthracis | ILTRMRDIAVQSSNGTNTAENQSALQKEFAELQEQIDYIAKNTE |
| | FNDKNLLAGTGAVTIGSTSISGAEISIETLDSSATNQQITIKLANT |
| | TAEKLGIDATTSNISISGAASALAAISALNTALNTVAGNRATLGA |
| | TLNRLDRNVENLNNQATNMASAASQIKDADKAKEMSEMTKFK |
| | ILNEAGISMLSQANQTPQMVSKLLQ |
| Flagellin | MRINTNINSMRTQEYMRQNQDKMNVSMNRLSSGKRINSAADD |
| SEQ ID NO: 72 | AAGLAIATRMRARQSGLEKASQNTQDGMSLIRTAESAMNSVSN |
| Bacillus anthracis | ILTRMRDIAVQSSNGTNTAENQSALQKEFAELQEQIDYIAKNTE |
| | FNDKNLLAGTGAVTIGSTSISGAEISIETLDSSATNQQITIKLANT |
| | TAEKLGIDATTSNISISGAASALAAISALNTALNTVAGNRATLGA |
| | TLNRLDRNVENLNNQATNMASAASQIEDADMAKEMSEMTKFK |
| | ILNEAGISMLSQANQTPQMV |
| Flagellin | MNVSMNRLSSGKRINSAADDAAGLAIATRMRARQSGLEKASQ |
| SEQ ID NO: 73 | NTQDGMSLIRTAESAMNSVSNILTRMRDIAVQSSNGTNTAENQS |
| Bacillus anthracis | ALQKEFAELQEQIDYIAKNTEFNDKNLLAGTGAVTIGSTSISGAE |
| strain H9401 | ISIETLDSSATNQQITIKLANTTAEKLGIDATTSNISISGAASALAA |
| | ISALNTALNTVAGNRATLGATLNRLDRNVENLNNQATNMASA |
| | ASQIEDADMAKEMSEMTKFKILNEAGISMLSQANQTPQMVSKL |
| | LQ |
| Flagellin | MRINHNITALNTYRQFNNANNAQAKSMEKLSSGQRINSASDDA |
| SEQ ID NO: 74 | AGLAISEKMRGQIRGLDQASRNAQDGVSLIQTAEGALNETHDIL |
| Bacillus megaterium | QRMRELVVQAGNGTNKTEDLDAIQDEIGSLIEEIGGEADSKGIS |
| strain WSH-002 | DRAQFNGRNLLDGSLDITLQVGANAGQQVNLKIGDMSAGALG |
| | ADTNSDGAADAFVNSINVKDFTATSFDDQLAIIDGAINQVSEQR |
| | SGLGATQNRLDHTINNLSTSSENLTASESRIRDVDYALAA |
| Flagellin | MRINHNLPALNAYRNLAQNQIGTSKILERLSSGYRINRASDDAA |
| SEQ ID NO: 75 | GLAISEKMRGQIRGLEQGQRNTMDGVSLIQTAEGALQEIHEML |
| Aneurinibacillus sp. | QRMRELAVQAANGTYSDKDKKAIEDEINQLTAQIDQIAKTTEF |
| XH2 | NGIQLIGDSDSTSLQDVKIQYGPKKEDSLTLELTTQPEADPPFAA |
| | GCKADKASLKIDNVDVISDPEGAIETFKAAIDQVSRIR SYFGAIQ |
| | NRLEHVVNNLSNYTENLTGAESRIRDADMAKEMTEFTRFNIINQ |
| | SATAMLAQANQLPQGVLQLLKG |

[0148] N- and C-Terminal Conserved Regions of Flagellin

[0149] The flagellin or flagellin-associated polypeptide used in the compositions and methods herein can comprise a truncated N-terminal polypeptide and an amino acid sequence of the truncated N-terminal polypeptide can comprise SEQ ID NO: 76, 78, 80, 82, 84, 86, 88, 90, 92, 94, 96, 98, 100, 102, 104, 106, 108, 109, 110, 112, 114, 116, 118, 120, 122, 124, 126, 128, 130, 132, 134, 136, 138, 140, 142, 144, 146, 148, 150, 152, 154, 156, 158, 160, 162, 164, 166, 168, 170, 172, 174, 176, 178, 180, 182, 184, 186, 188, 190, 192, 194, 196, 198, 200, 202, 204, 206, 208, 210, 212, 214, 216, 218, 220, 222, 224, 590, or any combination thereof.

[0150] The flagellin or flagellin-associated polypeptide used in the compositions and methods herein can comprise a truncated C-terminal polypeptide and an amino acid sequence of the truncated C-terminal polypeptide can comprise SEQ ID NO: 77, 79, 81, 83, 85, 87, 89, 91, 93, 95, 97, 99, 101, 103, 105, 107, 109, 111, 113, 115, 117, 119, 121, 123, 125, 127, 129, 131, 133, 135, 137, 141, 143, 145, 147, 149, 151, 153, 155, 157, 159, 161, 163, 165, 167, 169, 171, 173, 175, 177, 179, 181, 183, 185, 187, 189, 191, 201, 203, 205, 207, 209, 211, 213, 215, 217, 219, 221, 223, 225, or any combination thereof.

[0151] N-terminal and C-terminal conserved regions were identified from full length flagellin sequences from diverse strains of Bacillus spp. and other Eubacteria (Table 2). Conserved N- and C-terminal domains were identified using BLAST multiple alignment software and assigned functional annotations based on individual hits searching against Bacillus and other Eubacterial bacterial databases. The start site for the N-terminal region of the coding sequences is bolded methionine (M). The conserved domains are provided as amino acid sequences N-terminus (left column) and C-terminus (right column).

TABLE 2
N- and C-terminal conserved regions of flagellins

| SEQ ID NO: | Conserved N-terminus | Conserved C-terminus |
|---|---|---|
| Flagellin | GFLNMRINTNINSMRTQEYMRQ | IDAAITTVAGQRATLGA |
| N-SEQ ID NO: 76 | NQAKMSNAMDRLSSGKRINSAS | TLNRFEFNANNLKSQET |
| C-SEQ ID NO: 77 | DDAAGLAIATRMKAREGGLNV | SMADAASQIEDADMAK |
| Bacillus thuringensis | AGRNTQDGMSLIRTADSALNSV | EMSEMTKFKILNEAGIS |
| strain 4Q7 | SNILLRMRDLANQSANGTNTKG | MLSQANQTPQMVSKLL |
| [CDS of SEQ ID NO: 1] | NQASLQKEFAQLTEQIDYIAKNT | Q |
| | QFNDQQLLGTADKKIKIQTL | |
| Flagellin | GFLNMRINTNINSMRTQEYMRQ | IDAAITTVAGQRATLGA |
| N-SEQ ID NO: 78 | NQAKMSNAMDRLSSGKRINSAS | TLNRFEFNANNLKSQET |
| C-SEQ ID NO: 79 | DDAAGLAIATRMKAREGGLNV | SMADAASQIEDADMAK |
| Bacillus thuringiensis, | AGRNTQDGMSLIRTADSALNSV | EMSEMTKFKILNEAGIS |
| strain | SNILLRMRDLANQSANGTNTKG | MLSQANQTPQMVSKLL |
| HD1002 | NQASLQKEFAQLTEQIDYIAKNT | Q |
| [CDS of SEQ ID NO: 2] | QFNDQQLLGTADKKIKIQTL | |
| Flagellin | GFLNMRINTNINSMRTQEYMRQ | IDAAITTVAGQRATLGA |
| N-SEQ ID NO: 80 | NQAKMSNAMDRLSSGKRINSAS | TLNRFEFNANNLKSQET |
| C-SEQ ID NO: 81 | DDAAGLAIATRMKAREGGLNV | SMADAASQIEDADMAK |
| Bacillus thuringiensis, | AGRNTQDGMSLIRTADSALNSV | EMSEMTKFKILNEAGIS |
| strain HD-789 | SNILLRMRDLANQSANGTNTKG | MLSQANQTPQMVSKLL |
| [CDS of SEQ ID NO: 3] | NQASLQKEFAQLTEQIDYIAKNT | Q |
| | QFNDQQLLGTADKKIKIQTL | |
| Flagellin | GFLNMRINTNINSMRTQEYMRQ | IDAAITTVAGQRATLGA |
| N-SEQ ID NO: 82 | NQAKMSNAMDRLSSGKRINSAS | TLNRFEFNANNLKSQET |
| C-SEQ ID NO: 83 | DDAAGLAIATRMKAREGGLNV | SMADAASQIEDADMAK |
| Bacillus cereus | AGRNTQDGMSLIRTADSALNSV | EMSEMTKFKILNEAGIS |
| strain G9842 | SNILLRMRDLANQSANGTNTKG | MLSQANQTPQMVSKLL |
| [CDS of SEQ ID NO: 4] | NQASLQKEFAQLTEQIDYIAKNT | Q |
| | QFNDQQLLGTADKKIKIQTL | |
| Flagellin | GFLNMRINTNINSMRTQEYMRQ | QLDAALTKVADNRATL |
| N-SEQ ID NO: 84 | NQAKMSNSMDRLSSGKRINSAA | GATLNRLDFNVNNLKS |
| C-SEQ ID NO: 85 | DDAAGLAIATRMKAREGGLNV | QENSMAASASQIEDAD |
| Bacillus thuringiensis | AARNTQDGMSLIRTADSALNSV | MAKEMSEMTKFKILNE |
| serovar indiana strain | SNILLRMRDLANQSATGTNTTK | AGISMLSQANQTPQMV |
| HD521 | NQVALNKEFAALKEQITYIADN | SKLLQ |
| [CDS of SEQ ID NO:5] | TQFNDKNLLKSTQEIKIQTL | |
| Flagellin | WGFLIMRINTNINSMRTQEYMR | AIAAIDAALTKVADNR |
| N-SEQ ID NO: 86 | QNQAKMSNSMDRLSSGKRINN | ATLGATLNRLDFNVNN |
| C-SEQ ID NO: 87 | ASDDAAGLAIATRMRARESGLG | LKSQSSSMASAASQIED |
| Bacillus thuringiensis | VAADNTQNGMSLIRTADSAMN | ADMAKEMSEMTKFKIL |
| strain CTC | SVSNILLRMRDIANQSANGTNT | NEAGISMLSQANQTPQ |
| [CDS of SEQ ID NO:6] | NENKSALQKEFAQLQKQITYIAE | MVSKLLQ |
| | NTQFNDKNLLNEDSEVKIQTLD | |
| | S | |
| Flagellin | GFLNMRINTNINSMRTQEYMRQ | RATLGATLNRLDFNVN |
| N-SEQ ID NO: 88 | NQAKMSNAMDRLSSGKRINNA | NLKSQSSSMAAAASQIE |
| C-SEQ ID NO: 89 | SDDAAGLAIATRMRARENGLG | DADMAKEMSEMTKFKI |
| Bacillus | VAANNTQDGMSLIRTADSAMN | LNEAGISMLSQAN |
| thuringiensis | SVSNILLRIVIRDLANQSANGTNT | |
| serovar yunnanensis | DDNQKALDKEFSALKEQIDYIS | |
| strain IEBC-T20001 | KNTEFNDKKLL | |
| [CDS of SEQ ID NO:7] | | |
| Flagellin | GFLNMRINTNINSMRTQEYMRQ | IDAALKTVADNRATLG |
| N-SEQ ID NO: 90 | NQAKMSNAMDRLSSGKRINNA | ATLNRLDFNVNNLKSQ |
| C-SEQ ID NO: 91 | SDDAAGLAIATRMRARENGLG | SASMASAASQIEDADM |
| Bacillus thuringiensis | VAANNTQDGMSLIRTADSALQS | AKEMSEMTKFKILNEA |
| serovar tolworthi | VSNILLRMRDLANQSANGTNTD | GISMLSQANQTPQMVS |
| [CDS of SEQ ID NO:8] | ENKAAMEKEFGQLKDQIKYITD | KLLQ |
| | NTQFNDKNLLDA | |
| Flagellin | MGVLNMRINTNINSMRTQEYM | RATLGATLNRLDFNVN |
| N-SEQ ID NO: 92 | RQNQAKMSNSMDRLSSGKRIN | NLKSQQSSMASAASQV |
| C-SEQ ID NO: 93 | NASDDAAGLAIATRMRARESGL | EDADMAKEMSEMTKF |
| Bacillus cereus strain | GVAANNTQDGMSLIRTADSAM | KILNEAGISMLSQANQT |
| FM1 | NSVSNILLRMRDIANQSANGTN | PQMVSKLLQ |
| [CDS of SEQ ID NO: 9] | TDKNQVALQKEFGELQKQIDYI | |
| | AKNTQFND | |
| Flagellin | MGVLNMRIGTNVLSMNARQSF | RADLGAMINQLQFNIE |
| N-SEQ ID NO: 94 | YENEKRMNVAIEHLATGKKLN | NLNSQSTALTDAASRIE |
| C-SEQ ID NO: 95 | HASDNPANVAIVTRMHARTSGI | DADMAQEMSDFLKFKL |
| Bacillus cereus strain | HVAIRNNEDAISMLRTAEAALQ | LTEVALSMVSQANQIP |
| FM1 | TVTNILQRMRDVAVQSANGTNS | QMVYKLLQ |
| [CDS of SEQ ID NO: | NKNRDSLNKEFQSLTEQIGYIDE | |
| 10] | TTEFND | |
| Flagellin | GFLNMRINTNINSMRTQEYMRQ | AVDSIDAALKTVASNR |
| N-SEQ ID NO: 96 | NQAKMSNAMDRLSSGKRINNA | ATLGATLNRLDFNVNN |
| C-SEQ ID NO: 97 | SDDAAGLAIATRMRARESGLGV | LKSQSASMASAASQIED |
| Bacillus thuringiensis | AANNTQDGMSLIRTADSALNSV | ADMAKEMSEMTKFKIL |
| strain MC28 | SNILLRMRDIANQSANGTNTAD | NEAGISMLSQANQTPQ |
| [CDS of SEQ ID NO: | NQQALQKEFGQLKEQISYIADN | MVSKLLQ |
| 11] | TEFNDKTLL | |
| Flagellin | GFLNMRINTNINSMRTQEYMRQ | LGATLNRLDFNVTNLK |
| N-SEQ ID NO: 98 | NQAKMSNSMDRLSSGKRINNAS | SQENSMAASASQIEDA |
| C-SEQ ID NO: 99 | DDAAGLAIATRMRSREGGLNV | DMAKEMSEMTKFKILN |
| Bacillus bombysepticus | AARNTEDGMSLIRTADSALNSV | EAGISMLSQANQTPQM |
| strain Wang | SNILLRMRDLANQSASGTNTDK | VSKLLQ |
| [CDS of SEQ ID NO: | NQAAMQKEFDQLKEQIQYI | |
| 12] | | |
| Flagellin | GFLNMRINTNINSMRTQEYMRQ | RATLGATLNRLDFNVT |
| N-SEQ ID NO: 100 | NQAKMSNSMDRLSSGKRINNAS | NLKSQENSMAASASQIE |
| C-SEQ ID NO: 101 | DDAAGLAIATRMRSREGGLNV | DADMAKEMSEMTKFKI |
| Bacillus thuringiensis | AARNTEDGMSLIRTADSALNSV | LNEAGISMLSQANQTP |
| serovar kenyae | SNILLRMRDLANQSASGTNTDK | QMVSKLLQ |
| [CDS of SEQ ID NO: | NQAAMQKEFDQLKEQIQYI | |
| 13] | | |
| Flagellin | GFLNMRINTNINSMRTQEYMRQ | RATLGATLNRLDFNVT |
| N-SEQ ID NO: 102 | NQAKMSNSMDRLSSGKRINNAS | NLKSQENSMAASASQIE |
| C-SEQ ID NO: 103 | DDAAGLAIATRMRSREGGLNV | DADMAKEMSEMTKFKI |
| Bacillus thuringiensis | AARNTEDGMSLIRTADSALNSV | LNEAGISMLSQANQTP |
| serovar kenyae | SNILLRMRDLANQSASGTNTDK | QMVSKLLQ |
| [CDS of SEQ ID NO: | NQAAMQKEFDQLKEQIQYI | |
| 14] | | |
| Flagellin (A-type) | GFLNMRINTNINSMRTQEYMRQ | RATLGATLNRLDFNVN |
| N-SEQ ID NO: 104 | NQAKMSNAMDRLSSGKRINNA | NLKSQSSSMASAASQIE |
| C-SEQ ID NO: 105 | SDDAAGLAIATRMRARENGLG | DADMAKEMSEMTKFKI |
| Bacillus cereus | VAANNTQDGMSLIRTADSALNS | LNEAGISMLSQANQTP |
| [CDS of SEQ ID NO: | VSNILLRMRDLANQSANGTNTG | QMVSKLLQ |
| 15] | DNQKALDKEFSALKEQIDYISK | |
| | NTEFNDKKLL | |
| Flagellin (A-type) | GFLNMRIGTNVLSMNARQSLYE | RADLGSMINRLQFNIEN |
| N-SEQ ID NO: 106 | NEKRMNVAMEHLATGKKLNN | LNSQSMALTDAASRIED |
| C-SEQ ID NO: 107 | ASDNPANIAIVTRMHARASGMR | ADMAQEMSDFLKFKLL |
| Bacillus cereus | LAIRNNEDTISMLRTAEAALQTL | TEVALSMVSQANQIPQ |
| [CDS of SEQ ID NO: | TNILQRMRDLAVQSANGTNSNK | MVSKLLQ |
| 16] | NRDSLNKEFQSLTEQIGYIGETT | |
| | EFND | |
| Flagellin | GVLNMRINTNINSMRTQEYMR | AIDAALTKVADNRATL |
| N-SEQ ID NO: 108 | QNQAKMSNAMDRLSSGKRINN | GATLNRLDFNVNNLKS |
| C-SEQ ID NO: 109 | ASDDAAGLAIATRMRARESGLN | QSSSMASAASQIEDAD |
| Bacillus thuringiensis | VAADNTQNGMSLIRTADSAMN | MAKEMSEMTKFKILNE |
| serovar finitimus | SVSNILLRMRDIANQSANGTNT | AGISMLSQANQTPQMV |
| strain YBT-020 | DSNKSALQKEFAELQKQITYIAD | SKLLQ |
| [CDS of SEQ ID NO: | NTQFNDKNLLKEDSEVKIQTLD | |
| 17] | S | |
| Flagellin | GVLNMRINTNINSMRTQEYMR | AAIDAALTKVADNRAT |
| N-SEQ ID NO: 110 | QNQAKMSNAMDRLSSGKRINN | LGATLNRLDFNVNNLK |
| C-SEQ ID NO: 111 | ASDDAAGLAIATRMRARESGLN | SQSSSMASAASQIEDAD |
| Bacillus thuringiensis | VAADNTQNGMSLIRTADSAMN | MAKEMSEMTKFKILNE |
| serovar finitimus | SVSNILLRMRDIANQSANGTNT | AGISMLSQANQTPQMV |
| strain YBT-020 | DSNKSALQKEFAELQKQITYIAD | SKLLQ |
| [CDS of SEQ ID NO: | NTQFNDKNLLKEDSEVKIQTLD | |
| 18] | S | |
| Flagellin | GFLNMRINTNINSMRTQEYMRQ | TVADNRATLGATLNRL |
| N-SEQ ID NO: 112 | NQAKMSNAMDRLSSGKRINNA | DFNVNNLKSQSASMAS |
| C-SEQ ID NO: 113 | SDDAAGLAIATRMRARESGLGV | AASQIEDADMAKEMSE |
| Bacillus cereus | AANNTQDGMSLIRTADSALNSV | MTKFKILNEAGISMLSQ |
| stain B4264 | SNILLRMRDLANQSANGTNTAE | ANQTPQMVSKLLQ |
| [CDS of SEQ ID NO: | NKAAMQKEFGELKDQIKYISEN | |
| 19] | TQFNDQHLL | |
| Flagellin | GFLNMRINTNINSMRTQEYMRQ | AIKSIDAALDTIASNRA |
| N-SEQ ID NO: 114 | NQAKMSNAMDRLSSGKRINNA | TLGATLNRLDFNVNNL |
| C-SEQ ID NO: 115 | SDDAAGLAIATRMRARESGLGV | KSQSSSMASAASQIEDA |
| Bacillus thuringiensis | AANNTQDGMSLIRTADSALNSV | DMAKEMSEMTKFKILN |
| serovar nigeriensis | SNILLRMRDIANQSANGTNTSD | EAGISMLSQANQTPQM |
| [CDS of SEQ ID NO: | NQKALDKEFSALKEQIDYISKNT | VSKLLQ |
| 20] | EFNDKKLL | |
| Flagellin | WGFLIMRINTNINSMRTQEYMR | AVDAIDAALKTVASNR |
| N-SEQ ID NO: 116 | QNQAKMSNAMDRLSSGKRINN | ATLGATLNRLDFNVNN |
| C-SEQ ID NO: 117 | ASDDAAGLAIATRMRARESGLG | LKSQSASMASAASQIED |
| Bacillus thuringiensis | VAANNTQDGMSLIRTADSALNS | ADMAKEMSEMTKFKIL |
| [CDS of SEQ ID NO: | VSNILLRMRDIANQSANGTNTA | NEAGISMLSQANQTPQ |
| 21] | DNQQALQKEFGQLKEQISYIAD | MVSKLLQ |
| | NTEFND | |
| Flagellin | WGFLIMRINTNINSMRTQEYMR | AVDAIDAALKTVASNR |
| N-SEQ ID NO: 118 | QNQAKMSNAMDRLSSGKRINN | ATLGATLNRLDFNVNN |
| C-SEQ ID NO: 119 | ASDDAAGLAIATRMRARESGLG | LKSQSASMASAASQIED |
| Bacillus thuringiensis | VAANNTQDGMSLIRTADSALNS | ADMAKEMSEMTKFKIL |
| serovar konkukian | VSNILLRMetRDIANQSANGTNT | NEAGISMLSQANQTPQ |
| strain 97-27 | ADNQQALQKEFGQLKEQISYIA | MVSKLLQ |
| [CDS of SEQ ID NO: | DNTEFNDKTLL | |
| 22] | | |
| Flagellin | WGFLIMRINTNINSMRTQEYMR | AIASIDAALESIASNRAT |
| N-SEQ ID NO: 120 | QNQAKMSNAMDRLSSGKRINN | LGATLNRLDFNVNNLK |
| C-SEQ ID NO: 121 | ASDDAAGLAIATRMRARESGLG | SQSSSMASAASQIEDAD |
| Bacillus thuringiensis | VAANNTQDGMSLIRTADSAMN | MAKEMSEMTKFKILNE |
| serovar konkukian | SVSNILLRMRDISNQSANGTNTD | AGISMLSQANQTPQMV |
| strain 97-27 | KNQSALDKEFAALKDQIDYISK | SKLLQ |
| [CDS of SEQ ID NO: | NTEFNDQKLL | |
| 23] | | |
| Flagellin protein FlaA | GFLNMRINTNINSMRTQEYMRQ | AIASIDAALESIASNRAT |
| N-SEQ ID NO: 122 | NQAKMSNAMDRLSSGKRINNA | LGATLNRLDFNVNNLK |
| C-SEQ ID NO: 123 | SDDAAGLAIATRMRARESGLGV | SQSSSMASAASQIEDAD |
| Bacillus thuringiensis | AANNTQDGMSLIRTADSAMNS | MAKEMSEMTKFKILNE |
| serovar thuringiensis | VSNILLRMRDISNQSANGTNTD | AGISMLSQANQTPQMV |
| strain IS5056 | KNQSALDKEFAALKDQIDYISK | SKLLQ |
| [CDS of SEQ ID NO: | NTEFNDQKLL | |
| 24] | | |
| Flagellin protein FlaA | GFLNMRINTNINSMRTQEYMRQ | AIASIDAALESIASNRAT |
| N-SEQ ID NO: 124 | NQAKMSNAMDRLSSGKRINNA | LGATLNRLDFNVNNLK |
| C-SEQ ID NO: 125 | SDDAAGLAIATRMRARESGLGV | SQSSSMASAASQIEDAD |
| Bacillus thuringiensis | AANNTQDGMSLIRTADSAMNS | MAKEMSEMTKFKILNE |
| serovar thuringiensis | VSNILLRMRDISNQSANGTNTD | AGISMLSQANQTPQMV |
| strain IS5056 | KNQSALDKEFAALKDQIDYISK | SKLLQ |
| [CDS of SEQ ID NO: | NTEFNDQKLL | |
| 25] | | |
| Flagellin B | GFLNMRINTNINSMRTQEYMRQ | AIASIDAALESIASNRAT |
| N-SEQ ID NO: 126 | NQAKMSNAMDRLSSGKRINNA | LGATLNRLDFNVNNLK |
| C-SEQ ID NO: 127 | SDDAAGLAIATRMRARESGLGV | SQSSSMASAASQIEDAD |
| Bacillus thuringiensis | AANNTQDGMSLIRTADSAMNS | MAKEMSEMTKFKILNE |
| strain Bt407 | VSNILLRMRDISNQSANGTNTD | AGISMLSQANQTPQMV |
| [CDS of SEQ ID NO: | KNQSALDKEFAALKDQIDYISK | SKLLQ |
| 26] | NTEFNDQKLL | |
| Flagellin | GFLNMRINTNINSMRTQEYMRQ | AIASIDAALESIASNRAT |
| N-SEQ ID NO: 128 | NQAKMSNAMDRLSSGKRINNA | LGATLNRLDFNVNNLK |
| C-SEQ ID NO: 129 | SDDAAGLAIATRMRARESGLGV | SQSSSMASAASQIEDAD |
| Bacillus thuringiensis | AANNTQDGMSLIRTADSAMNS | MAKEMSEMTKFKILNE |
| serovar chinensis CT-43 | VSNILLRMRDISNQSANGTNTD | AGISMLSQANQTPQMV |
| [CDS of SEQ ID NO: | KNQSALDKEFAALKDQIDYISK | SKLLQ |
| 27] | NTEFNDQKLL | |
| Flagellin | GFLNMRINTNINSMRTQEYMRQ | RATLGATLNRLDFNVN |
| N-SEQ ID NO: 130 | NQAKMSNAMDRLSSGKRINNA | NLKSQSSSMASAASQIE |
| C-SEQ ID NO: 131 | SDDAAGLAIATRMRARESGLGV | DADMAKEMSEMTKFKI |
| Bacillus thuringiensis | AANNTQDGISLIRTADSAMNSV | LNEAGISMLSQANQTP |
| serovar Canadensis | SNILLRMRDLANQSANGTNTNE | QMVSKLLQ |
| [CDS of SEQ ID NO: | NQAALNKEFDALKEQIDYISTNT | |
| 28] | EFNDKKLL | |
| Flagellin | GFLNMRINTNINSMRTQEYMRQ | RATLGATLNRLDFNVN |
| N-SEQ ID NO: 132 | NQAKMSNAMDRLSSGKRINNA | NLKSQSSSMASAASQIE |
| C-SEQ ID NO: 133 | SDDAAGLAIATRMRARESGLGV | DADMAKEMSEMTKFKI |
| Bacillus thuringiensis | AANNTQDGISLIRTADSAMNSV | LNEAGISMLSQANQTP |
| serovar galleriae | SNILLRMRDLANQSANGTNTNE | QMVSKLLQ |
| [CDS of SEQ ID NO: | NQAALNKEFDALKEQIDYISTNT | |
| 29] | EFNDKKLL | |
| Flagellin N-terminal | GVLNMRINTNINSMRTQEYMR | RATLGATLNRLDFNVN |
| helical region | QNQAKMSNAMDRLSSGKRINN | NLKSQSSSMASAASQIE |
| N-SEQ ID NO: 134 | ASDDAAGLAIATRMRARESGLS | DADMAKEMSEMTKFKI |
| C-SEQ ID NO: 135 | VAANNTQDGMSLIRTADSAMN | LNEAGISMLSQANQTP |
| Bacillus | SVSNILLRMRDLSNQSANGTNT | QMVSKLLQ |
| weihenstephanensis | DENQQALNKEFAALKDQIDYIS | |
| [CDS of SEQ ID NO: | KNTEFNDKKLL | |
| 30] | | |
| Flagellin | GFLNMRINTNINSMRTQEYMRQ | IDAALETIASNRATLGA |
| N-SEQ ID NO: 136 | NQAKMSNAMDRLSSGKRINNA | TLNRLDFNVNNLKSQS |
| C-SEQ ID NO: 137 | SDDAAGLAIATRMRARESGLGV | SSMASAASQIEDADMA |
| Bacillus thuringiensis | AANNTQDGMSLIRTADSALNSV | KEMSEMTKFKILNEAGI |
| serovar ostriniae | SNILLRMRDIANQSANGTNTGD | SMLSQANQTPQMVSKL |
| [CDS of SEQ ID NO: | NQKALDKEFSALKEQIDYISKNT | LQS |
| 31] | EFNDKKLL | |
| Flagellin | WGFLIMRINTNINSMRTQEYMR | LGATLNRLDFNVNNLK |
| N-SEQ ID NO: 138 | QNQTKMSNAMDRLSSGKRINN | SQSSSMAAAASQIEDA |
| C-SEQ ID NO: 139 | ASDDAAGLAIATRMRARENGL | DMAKEMSEMTKFKILN |
| Bacillus thuringiensis | GVAANNTQDGMSLIRTADSAM | EAGISMLSQANQTPQM |
| [CDS of SEQ ID NO: | NSVSNILLRMRDLANQSANGTN | VSKLLQ |
| 32] | TDDNQKALDKEFSALKEQIDYIS | |
| | KNTEFNDKKLL | |
| Flagellin | WGFLIMRINTNINSMRTQEYMR | LGATLNRLDFNVNNLK |
| N-SEQ ID NO: 140 | QNQTKMSNAMDRLSSGKRINN | SQSSSMAAAASQIEDA |
| C-SEQ ID NO: 141 | ASDDAAGLAIATRMRARENGL | DMAKEMSEMTKFKILN |
| Bacillus thuringiensis | GVAANNTQDGMSLIRTADSAM | EAGISMLSQANQTPQM |
| [CDS of SEQ ID NO: | NSVSNILLRMRDLANQSANGTN | VSKLLQ |
| 33] | TDDNQKALDKEFSALKEQIDYIS | |
| | KNTEFNDKKLL | |
| Flagellin | WGFLIMRINTNINSMRTQEYMR | RATLGATLNRLDFNVN |
| N-SEQ ID NO: 142 | QNQTKMSNAMDRLSSGKRINN | NLKSQSSSMAAAASQIE |
| C-SEQ ID NO: 143 | ASDDAAGLAIATRMRARENGL | DADMAKEMSEMTKFKI |
| Bacillus thuringiensis | GVAANNTQDGMSLIRTADSAM | LNEAGISMLSQANQTP |
| serovar pondicheriensis | NSVSNILLRMRDLANQSANGTN | QMVSKLLQ |
| [CDS of SEQ ID NO: | TDDNQKALDKEFSALKEQIDYIS | |
| 34] | KNTEFNDKKLL | |
| Flagellin B | GFLNMRINTNINSMRTQDYMRQ | AIASIDAALESIASNRAT |
| N-SEQ ID NO: 144 | NQAKMSNAMDRLSSGKRINNA | LGATLNRLDFNVNNLK |
| C-SEQ ID NO: 145 | SDDAAGLAIATRMRARESGLGV | SQSSSMASAASQIEDAD |
| Bacillus thuringiensis | AANNTQDGMSLIRTADSAMNS | MAKEMSEMTKFKILNE |
| serovar Berliner | VSNILLRMRDISNQSANGTNTD | AGISMLSQANQTPQMV |
| [CDS of SEQ ID NO: | KNQSALDKEFAALKDQIDYISK | SKLLQ |
| 35] | NTEFNDQKLL | |
| Flagellin A | GFLNMARITINLEIDFFAYYRFSI | AIASIDAALESIASNRAT |
| N-SEQ ID NO: 146 | CRKVNIKKWGFLNMRINTNINS | LGATLNRLDFNVNNLK |
| C-SEQ ID NO: 147 | MRTQDYMRQNQAKMSNAMDR | SQSSSMASAASQIEDAD |
| Bacillus thuringiensis | LSSGKRINNASDDAAGLAIATR | MAKEMSEMTKFKILNE |
| serovar Berliner | MRARESGLGVAANNTQDGMSL | AGISMLSQANQTPQMV |
| [CDS of SEQ ID NO: | IRTADSAMNSVSNILLRMRDISN | SKLLQ |
| 36] | QSANGTNTDKNQSALDKEFAAL | |
| | KDQIDYISKNTEFNDQKLL | |
| Flagellin | GVLYMRINTNINSMRTQEYMR | TVADNRATLGATLNRL |
| N-SEQ ID NO: 148 | QNQAKMSNAMDRLSSGKRINN | DFNVNNLKSQSSAMAA |
| C-SEQ ID NO: 149 | ASDDAAGLAIATRMRARE | SGLSSASQIEDADMAKEMSE |
| Bacillus cereus strain Q1 | VAADNTQNGMSLIRTADSAMN | MTKFKILNEAGISMLSQ |
| [CDS of SEQ ID NO: | SVSNILLRMRDIANQSANGTNT | ANQTPQMVSKLLQ |
| 37] | DKNQVALQKEFAALKEQITYIA | |
| | DNTQFNDKNLLNGNQTINIQTL | |
| | DSHDST | |
| Flagellin | GVLYMRINTNINSMRTQEYMR | TVADNRATLGATLNRL |
| N-SEQ ID NO: 150 | QNQAKMSNAMDRLSSGKRINN | DFNVNNLKSQSSAMAA |
| C-SEQ ID NO: 151 | ASDDAAGLAIATRMRARE | SGLSSASQIEDADMAKEMSE |
| Bacillus cereus strain Q1 | VAADNTQNGMSLIRTADSAMN | MTKFKILNEAGISMLSQ |
| [CDS of SEQ ID NO: | SVSNILLRMRDIANQSANGTNT | ANQTPQMVSKLLQ |
| 38] | DKNQVALQKEFAALKEQITYIA | |
| | DNTQFNDKNLLNGNQTINIQTL | |
| | DSHDST | |
| Flagellin | GFLNMRINTNINSMRTQEYMRQ | LGATLNRLDFNVNNLK |
| N-SEQ ID NO: 152 | NQAKMSNAMDRLSSGKRINNA | SQSSSMASAASQIEDAD |
| C-SEQ ID NO: 153 | SDDAAGLAIATRMRARESGLGV | MAKEMSEMTKFKILNE |
| Bacillus thuringiensis | AANNTQDGMSLIRTADSALNSV | AGISMLSQANQTPQMV |
| serovar morrisoni | SNILLRMRDIANQSANGTNTGD | SKLLQ |
| [CDS of SEQ ID NO: | NQKALDKEFSALKEQIDYISKNT | |
| 39] | EFNDKKLL | |
| Flagellin | GFLNMRINTNINSMRTQEYMRQ | AIKSIDAALDTIASNRA |
| N-SEQ ID NO: 154 | NQTKMSNAMDRLSSGKRINNAS | TLGATLNRLDFNVNNL |
| C-SEQ ID NO: 155 | DDAAGLAIATRMRARENGLGV | KSQSSSMASAASQIEDA |
| Bacillus thuringiensis | AANNTQDGMSLIRTADSALNSV | DMAKEMSEMTKFKILN |
| serovar neoleonensis | SNILLRMRDIANQSANGTNT | SDEAGISMLSQANQTPQM |
| [CDS of SEQ ID NO: | NQKALDKEFSALKEQIDYISKNT | VSKLLQ |
| 40] | EFNDKKLL | |
| Flagellin | GFLNMRINTNINSMRTQEYMRQ | RATLGATLNRLDFNVN |
| N-SEQ ID NO: 156 | NQAKMSNAMDRLSSGKRINNA | NLKSQSSSMASAASQIE |
| C-SEQ ID NO: 157 | SDDAAGLAIATRMRARESGLGV | DADMAKEMSEMTKFKI |
| Bacillus thuringiensis | AANNTQDGMSLIRTADSALNSV | LNEAGISMLSQANQTP |
| serovar morrisoni | SNILLRMRDIANQSANGTNTGD | QMVSKLLQ |
| [CDS of SEQ ID NO: | NQKALDKEFSALKEQIDYISKNT | |
| 41] | EFNDKKLL | |
| Flagellin | GFLNMRINTNINSMRTQEYMRQ | RATLGATLNRLDFNVN |
| N-SEQ ID NO: 158 | NQAKMSNAMDRLSSGKRINNA | NLKSQSSSMASAASQIE |
| C-SEQ ID NO: 159 | SDDAAGLAIATRMRARESGLGV | DADMAKEMSEMTKFKI |
| Bacillus thuringiensis | AANNTQDGMSLIRTADSALNSV | LNEAGISMLSQANQTP |
| serovar morrisoni | SNILLRMRDIANQSANGTNTGD | QMVSKLLQ |
| [CDS of SEQ ID NO: | NQKALDKEFSALKEQIDYISKNT | |
| 42] | EFNDKKLL | |
| Flagellin | GFLNMRINTNINSMRTQEYMRQ | LGATLNRLDFNVNNLK |
| N-SEQ ID NO: 160 | NQAKMSNAMDRLSSGKRINNA | SQQSSMASAASQIEDA |
| C-SEQ ID NO: 161 | SDDAAGLAIATRMRARESGLGV | DMAKEMSEMTKFKILN |
| Bacillus thuringiensis | AANNTQDGMSLIRTADSAMNS | EAGISMLSQANQTPQM |
| serovar jegathesan | VSNILLRMRDIANQSANGTNTN | VSKLLQ |
| [CDS of SEQ ID NO: | GNQAALNKEFDALKQQINYIST | |
| 43] | NTEFNDKKLLDGSNKTIAIQTLD | |
| Flagellin | GVLNMRINTNINSMRTQEYMR | DKIDEALKTIADNRATL |
| N-SEQ ID NO: 162 | QNQAKMSNAMDRLSSGKRINN | GATLNRLDFNVNNLKS |
| C-SEQ ID NO: 163 | ASDDAAGLAIATRMRARESGLG | QSASMASAASQIEDAD |
| Bacillus cereus stain | VAANNTQDGMALIRTADSAMN | MAKEMSEMTKFKILNE |
| ATCC 10987 | SVSNILLRRDIANQSANGTNTDK | AGISMLSQANQTPQMV |
| [CDS of SEQ ID NO: | NQAALQKEFGELQKQIDYIAGN | SKLLQ |
| 44] | TQFNDK | |
| Flagellin | WGFLIMRINTNINSMRTQEYMR | RATLGATLNRLDFNVN |
| N-SEQ ID NO: 164 | QNQAKMSNAMDRLSSGKRINN | NLKSQQSSMASAASQIE |
| C-SEQ ID NO: 165 | ASDDAAGLAIATRMRARESGLG | DADMAKEMSEMTKFKI |
| Bacillus thuringiensis | VAANNTQDGMSLIRTADSAMN | LNEAGISMLSQANQTP |
| serovar monterrey | SVSNILLRMRDLANQSANGTNT | QMVSKLLQ |
| [CDS of SEQ ID NO: | NENQAALNKEFDALKEQINYIST | |
| 45] | NTEFNDKKLL | |
| Flagellin | WGFFYMRINTNINSMRTQEYM | TVADNRATLGATLNRL |
| N-SEQ ID NO: 166 | RQNQAKMSNAMDRLSSGKRIN | DFNVNNLKSQASSMAA |
| C-SEQ ID NO: 167 | NASDDAAGLAIATRMRARESGL | AASQVEDADMAKEMS |
| Bacillus cereus strain | GVASNNTQDGMSLIRTADSALN | EMTKFKILNEAGISMLS |
| NC 7401 | SVSNILLRMRDLANQSANGTNT | QANQTPQMVSKLLQ |
| [CDS of SEQ ID NO: | NENKAAMQKEFGELKEQIKYIA | |
| 46] | ENTQFNDQHLL | |
| Flagellin | WGFFYMRINTNINSMRTQEYM | TVADNRATLGATLNRL |
| N-SEQ ID NO: 168 | RQNQAKMSNAMDRLSSGKRIN | DFNVNNLKSQASSMAA |
| C-SEQ ID NO: 169 | NASDDAAGLAIATRMRARESGL | AASQVEDADMAKEMS |
| Bacillus cereus strain | GVASNNTQDGMSLIRTADSALN | EMTKFKILNEAGISMLS |
| NC 7401 | SVSNILLRMRDLANQSANGTNT | QANQTPQMVSKLLQ |
| [CDS of SEQ ID NO: | NENKAAMQKEFGELKEQIKYIA | |
| 47] | ENTQFNDQHLL | |
| Flagellin (A-type) | GVLNMRINTNINSLRTQEYMRQ | IDAALKTVADNRATLG |
| N-SEQ ID NO: 170 | NQAKMSNSMDRLSSGKRINNAS | ATLNRLDFNVNNLKSQ |
| C-SEQ ID NO: 171 | DDAAGLAIATRMRARESGLNV | SSSMASAASQIEDADM |
| Bacillus cereus strain | AANNTQDGMSLIRTADSALGSV | AKEMSEMTKFKILNEA |
| AH820 | SNILLRMRDLANQSANGTNTSD | GISMLSQANQTPQMVS |
| [CDS of SEQ ID NO: | NQAAMQKEFAELQKQITYIADN | KLLQ |
| 48] | TQFNDKNLL | |
| Flagellin | WGFFYMRINTNINSMRTQEYM | TVADNRATLGATLNRL |
| N-SEQ ID NO: 172 | RQNQAKMSNAMDRLSSGKRIN | DFNVNNLKSQASSMAA |
| C-SEQ ID NO: 173 | NASDDAAGLAIATRMRARESGL | AASQVEDADMAKEMS |
| Bacillus cereus AH187 | GVASNNTQDGMSLIRTADSALN | EMTKFKILNEAGISMLS |
| [CDS of SEQ ID NO: | SVSNILLRMRDLANQSANGTNT | QANQTPQMVSKLLQ |
| 49] | NENKAAMQKEFGELKEQIKYIA | |
| | ENTQFNDQHLL | |
| Flagellin | WGFFYMRINTNINSMRTQEYM | TVADNRATLGATLNRL |
| N-SEQ ID NO: 174 | RQNQAKMSNAMDRLSSGKRIN | DFNVNNLKSQASSAAA |
| C-SEQ ID NO: 175 | NASDDAAGLAIATRMRARESGL | ASQVEDADMAKEMSE |
| Bacillus cereus | GVASNNTQDGMSLIRTADSALN | MTKFKILNEAGISMLSQ |
| [CDS of SEQ ID NO: | SVSNILLRMRDLANQSANGTNT | ANQTPQMVSKLLQ |
| 50] | NENKAAMQKEFGELKEQIKYIA | |
| | ENTQFNDQHLL | |
| Flagellin protein Fla | GFLNMRINTNINSMRTQEYMRQ | LGATLNRLDFNVNNLK |
| N-SEQ ID NO: 176 | NQAKMSNAMDRLSSGKRINNA | SQSSSMASAASQIEDAD |
| C-SEQ ID NO: 177 | SDDAAGLAIATRMRARESGLGV | MAKEMSEMTKFKILNE |
| Bacillus cereus | AANNTQDGMSLIRTADSALNSV | AGISMLSQANQTPQMV |
| [CDS of SEQ ID NO: | SNILLRMRDIANQSANGTNTGD | SKLLQ |
| 51] | NQKALDKEFSALKEQIDYISKNT | |
| | EFNDKKLL | |
| Flagellin | GFLNMRINTNINSMRTQEYMRQ | RATLGATLNRLDFNVT |
| N-SEQ ID NO: 178 | NQTKMSNAMDRLSSGKRINNAS | NLKSQENSMAASASQIE |
| C-SEQ ID NO: 179 | DDAAGLAIATRMRSREGGLNV | DADMAKEMSEMTKFKI |
| Bacillus thuringiensis | AARNTEDGMSLIRTADSALNSV | LNEAGISMLSQANQTP |
| Strain HD-771 | SNILLRMRDLANQSASETNTSK | QMVSKLLQ |
| [CDS of SEQ ID NO: | NQAAMQKEFDQLKEQIQYI | |
| 52] | | |
| Flagellin | GFLNMRINTNINSMRTQEYMRQ | RATLGATLNRLDFNVT |
| N-SEQ ID NO: 180 | NQTKMSNAMDRLSSGKRINNAS | NLKSQENSMAASASQIE |
| C-SEQ ID NO: 181 | DDAAGLAIATRMRSREGGLNV | DADMAKEMSEMTKFKI |
| Bacillus thuringiensis | AARNTEDGMSLIRTADSALNSV | LNEAGISMLSQANQTP |
| serovar sotto | SNILLRMRDLANQSASETNTSK | QMVSKLLQ |
| [CDS of SEQ ID NO: | NQAAMQKEFDQLKEQIQYI | |
| 53] | | |
| Flagellin | MGVLNMRINTNINSMRTQEYM | AIKAIDEALETIASNRAT |
| N-SEQ ID NO: 182 | RQNQAKMSTAMDRLSSGKRIN | LGATLNRLDFNVNNLK |
| C-SEQ ID NO: 183 | NASDDAAGLAIATRMRARESGL | NQASSMASAASQVEDA |
| Bacillus thuringiensis | GVAANNTQDGISLIRTADSAMN | DMAKEMSEMTKFKILN |
| serovar Novosibirsk | SVSNILLRMRDLANQSANGTNT | EAGISMLSQANQTPQM |
| [CSD of SEQ ID NO: | DKNQGALDKEFAALKEQIDYIS | VSKLLQ |
| 54] | KNTEFNDKKLL | |
| Flagellin | MGVLNMRINTNINSMRTQEYM | AIDSALENIASNRATLG |
| N-SEQ ID NO: 184 | RQNQAKMSNAMDRLSSGKRIN | ATLNRLDFNVNNLKSQ |
| C-SEQ ID NO: 185 | NASDDAAGLAIATRMRARESGL | SSSMASAASQIEDADM |
| Bacillus thuringiensis | GVAANNTQDGISLIRTADSAMN | AKEMSEMTKFKILNEA |
| serovar Londrina | SVSNILLRMRDLANQSANGTNT | GISMLSQANQTPQMVS |
| [CDS of SEQ ID NO: | SENQAALDKEFGALKEQINYIST | KLLQ |
| 55] | NTEFNDKKLL | |
| Flagellin | MGVLNMRINTNINSMRTQEYM | LGATLNRLDFNVNNLK |
| N-SEQ ID NO: 186 | RQNQAKMSTAMDRLSSGKRIN | NQASSMASAASQVEDA |
| C-SEQ ID NO: 187 | NASDDAAGLAIATRMRARESGL | DMAKEMSEMTKFKILN |
| Bacillus cereus strain | GVAANNTQDGISLIRTADSAMN | EAGISMLSQANQTPQM |
| E33L | SVSNILLRMRDLANQSANGTNT | VSKLLQ |
| [CDS of SEQ ID NO: | DKNQGALDKEFAALKEQIDYIS | |
| 56] | KNTEFNDKKLL | |
| Flagellin | MGVLNMRINTNINSMRTQEYM | ATLNRLDFNVNNLKNQ |
| N-SEQ ID NO: 188 | RQNQAKMSTAMDRLSSGKRIN | ASSMASAASQVEDAD |
| C-SEQ ID NO: 189 | NASDDAAGLAIATRMRARESGL | MAKEMSEMTKFKILNE |
| Bacillus cereus strain | GVAANNTQDGISLIRTADSAMN | AGISMLSQANQTPQMV |
| E33L | SVSNILLRMRDLANQSANGTNT | SKLLQ |
| [CDS of SEQ ID NO: | DKNQGALDKEFAALKEQIDYIS | |
| 57] | KNTEFNDKKLL | |
| Flagellin | WGFFYMRINTNINSMRTQEYM | AIAAIDAALTKVADNR |
| N-SEQ ID NO: 190 | RQNQAKMSTAMDRLSSGKRIN | ATLGATLNRLDFNVNN |
| C-SEQ ID NO: 191 | NASDDAAGLAIATRMRARESGL | LKSQASSMASAASQVE |
| Bacillus cereus | GVAANNTQDGISLIRTADSAMN | DADMAKEMSEMTKFKI |
| strain FRI-35 | SVSNILLRMRDLANQSANGTNT | LNEAGISMLSQANQTP |
| [CDS of SEQ ID NO: | DKNQAALDKEFNALKEQIDYIS | QMVSKLLQ |
| 58] | KNTEFNDKKL | |
| Flagellin | WGFFYMRIGTNVLSLNARQSLY | AIRKIEEALQNVSLHRA |
| N-SEQ ID NO: 192 | ENEKRMNVAMEHLATGKKLNN | DLGAMINRLQFNIENLN |
| C-SEQ ID NO: 193 | ASDNPANIAIVTRMHARASGMR | SQSTALTDAASRIEDAD |
| Bacillus cereus | VAIRNNEDAISMLRTAEAALQT | MAQEMSDFLKFKLLTE |
| strain FRT-35 | VTNVLQRMRDLAVQSANGTNS | VALSMVSQANQVPQM |
| [CDS of SEQ ID NO: | NKNRDSLNKEFQSLTEQIGYIDE | VSKLLQ |
| 59] | TTEFNN | |
| Flagellin | LVPFAVWLAMSRIRRRILDTDC | MAASASQIEDADMAKE |
| N-SEQ ID NO: 194 | KAESAVRIKEIPSDVLRAATERP | MSEMTKFKILSEAGISM |
| C-SEQ ID NO: 195 | LSCARIRVAIARPAASSEALLIRL | LSQANQTPQMVSKLLQ |
| Bacillus thuringiensis | PLDKRSIALLILAWFWRMYSCV | |
| [CDS of SEQ ID NO: | RMLLMFVLILMLRTP | |
| 60] | | |
| Flagellin | AVWLAMSRIRRRILDTDCKAES | SMAASASQIEDADMAK |
| N-SEQ ID NO: 196 | AVRIKEIPSDVLRAATERPLSCA | EMSEMTKFKILSEAGIS |
| C-SEQ ID NO: 197 | RIRVAIARPAASSEALLIRLPLDK | MLSQANQTPQMVSKLL |
| Bacillus cereus strain | RSIALLILAWFWRMYSCVRMLL | Q |
| ATCC 4342 | MFVLILMLRTP | |
| [CDS of SEQ ID NO: | | |
| 61] | | |
| Flagellin | GFLNMRIGTNFLSMNARQSLYE | LGAMINRLHFNIENLNS |
| N-SEQ ID NO: 198 | NEKRMNVAMEHLATGKKLNH | QSMALTDAASRIEDAD |
| C-SEQ ID NO: 199 | ASDNPANIAIVTRMHARANGMR | MAQEMSDFLKFKLLTE |
| Bacillus thuringiensis | VAIRNNEDAISMLRTAEAALQT | VALSMVSQANQIPQMV |
| [CDS of SEQ ID NO: | VMNILQRMRDLAIQSANSTNSN | SKLLQ |
| 62] | KNRDSLNKEFQSLTEQISYI | |
| Flagellin | GFLNMRINTNINSMRTQEYMRQ | LGATLNRLDFNVNNLK |
| N-SEQ ID NO: 200 | NQAKMSNAMDRLSSGKRINNA | SQSSSMASAASQIEDAD |
| C-SEQ ID NO: 201 | SDDAAGLAIATRMRARESGLGV | MAKEMSEMTKFKILNE |
| Bacillus thuringiensis | AANNTQDGMSLIRTADSALNSV | AGISMLSQANQTPQMV |
| [CDS of SEQ ID NO: | SNILLRMRDIANQSANGTNTGD | SKLLQ |
| 63] | NQKALDKEFSALKEQIDYI | |
| Flagellin | MRINHNITALNTYRQFNNANNA | IDGAINQVSEQRSGLGA |
| N-SEQ ID NO: 202 | QAKSMEKLSSGQRINSASDDAA | TQNRLDHTINNLSTSSE |
| C-SEQ ID NO: 203 | GLAISEKMRGQIRGLDQASRNA | NLTASESRIRDVDYALA |
| Bacillus aryabhattai | QDGVSLIQTAEGALNETHDILQR | A |
| [CDS of SEQ ID NO: | MRELVVQAGNGTNKTEDLDAI | |
| 64] | QDEIGSLIEEIGGETDSKGISDRA | |
| | QFNGRNLLDGSLDITLQVGA | |
| Flagellin | MRINTNINSMRTQEYMRQNQD | IDQAIQDIADNRATYGS |
| N-SEQ ID NO: 204 | KMNTSMNRLSSGKQINSASDDA | QLNRLDHNLNNVNSQA |
| C-SEQ ID NO: 205 | AGLAIATRMRAKEGGLNVGAK | TNMAAAASQIEDADM |
| Bacillus manliponensis | NTQDGMSALRTMDSALNSVSNI | AKEMSEMTKFKILSEA |
| [CDS of SEQ ID NO: | LLRMRDLATQSATGTNQGNDR | GVSMLSQANQTPQMVS |
| 65] | ESLDLEFQQLTEEITHIAEKTNFN | KLLQ |
| | GNALLSGSGSAINVQLS | |
| Flagellin | MRIGSWTATGMSIVNUMNRNW | LDEATKNVSMERSRLG |
| N-SEQ ID NO: 206 | NAASKSMLRLSSGYRINSAADD | AYQNRLEHAYNVAENT |
| C-SEQ ID NO: 207 | AAGLAISEKMRGQIRGLTMASK | AINLQDAESRIRDVDIA |
| Lysinibacillus sp. strain | NIMDGVSLIQTAEGALNETHAIV | KEMMNMVKSQILAQV |
| BF-4 | QRMRELAVQAATDTNTDDDRA | GQQVLAMHMQQAQGI |
| [CDS of SEQ ID NO: | KLDLEFQELKKEIDRISTDTEFN | LRLLG |
| 66] | TRTLLNGDYKDNGLKIQVG | |
| Flagellin | MKIGSWTATGMSIVNHMNRNW | LDEATKNVSMERSRLG |
| N-SEQ ID NO: 208 | NAASKSMLRLSSGYRINSAADD | AYQNRLEHAYNVAENT |
| C-SEQ ID NO: 209 | AAGLAISEKMRGQIRGLTMASK | AINLQDAESRIRDVDIA |
| Lysinibacillus sp. strain | NIMDGVSLIQTAEGALNETHAIV | KEMMHMVKSQILAQV |
| 13S34 air | QRMRELAVQAATDTNTDDDRA | GQQVLAMHIQQAQGIL |
| [CDS of SEQ ID NO: | KLDLEFQELKKEIDRISTDTAFN | RLLG |
| 67] | TRTLLNGDYKDNGLKIQVG | |
| Flagellin | MIISHNLTALNTMNKLKQKDLA | ISAAIDKVSAERARMG |
| N-SEQ ID NO: 210 | VSKSLGKLSSGLRINGASDDAA | AYQNRLEHSRNNVVTY |
| C-SEQ ID NO: 211 | GLAISEKMRGQIRGLNQASRNIQ | AENLTAAESRIRDVDM |
| Paenibacillus sp. strain | DGISLIQVADGAMQEIHSMLQR | AKEMMELMKNQIFTQA |
| HW567 | MNELAVQASNGTYSGSDRLNIQ | GQAMLLQTNTQPQAIL |
| [CDS of SEQ ID NO: | SEVEQLIEEIDEIAGNTGFNGIKL | QLLK |
| 68] | LNGNNEKTEKTEK | |
| Flagellin | MRINTNINSMRTQEYMRQNQA | IDSALETIASNRATLGA |
| N-SEQ ID NO: 212 | KMSNAMDRLSSGKRINNASDD | TLNRLDFNVNNLKSQS |
| C-SEQ ID NO: 213 | AAGLAIATRMRARESGLGVAA | SAMASAASQIEDADMA |
| Bacillus anthracis | NNTQDGMSLIRTADSAMNSVSN | KEMSEMTKFKILNEAGI |
| [CDS of SEQ ID NO: | ILLRMRDLANQSANGTNTKENQ | SMLSQANQTPQMVSKL |
| 69] | DALDKEFGALKEQIDYISKNTEF | LQ |
| | NDKKLLNGDNKSIAIQTL | |
| Flagellin | MQKSQYKKMGVLKMRINTNIN | ALNTVAGNRATLGATL |
| N-SEQ ID NO: 214 | SMRTQEYMRQNQDKMNVSMN | NRLDRNVENLNNQATN |
| C-SEQ ID NO: 215 | RLSSGKRINSAADDAAGLAIATR | MASAASQIEDADMAKE |
| Bacillus anthracis | MRARQSGLEKASQNTQDGMSLI | MSEMTKFKILNEAGISM |
| [CDS of SEQ ID NO: | RTAESAMNSVSNILTRMRDIAV | LSQANQTPQMVSKLLQ |
| 70] | QSSNGTNTAENQSALQKEFAEL | |
| | QEQIDYIAKNTEFNDKNLLAGT | |
| | GAVTIGSTSISGAEISIETL | |
| Flagellin | MRINTNINSMRTQEYMRQNQD | ALNTVAGNRATLGATL |
| N-SEQ ID NO: 216 | KMNVSMNRLSSGKRINSAADD | NRLDRNVENLNNQATN |
| C-SEQ ID NO: 217 | AAGLAIATRMRARQSGLEKASQ | MASAASQIKDADKAKE |
| Bacillus anthracis | NTQDGMSLIRTAESAMNSVSNI | MSEMTKFKILNEAGISM |
| [CDS of SEQ ID NO: | LTRMRDIAVQSSNGTNTAENQS | LSQANQTPQMVSKLLQ |
| 71] | ALQKEFAELQEQIDYIAKNTEFN | |
| | DKNLLAGTGAVTIGSTSISGAEIS | |
| | IETL | |
| Flagellin | MRINTNINSMRTQEYMRQNQD | ALNTVAGNRATLGATL |
| N-SEQ ID NO: 218 | KMNVSMNRLSSGKRINSAADD | NRLDRNVENLNNQATN |
| C-SEQ ID NO: 219 | AAGLAIATRMRARQSGLEKASQ | MASAASQIEDADMAKE |
| Bacillus anthracis | NTQDGMSLIRTAESAMNSVSNI | MSEMTKFKILNEAGISM |
| [CDS of SEQ ID NO: | LTRMRDIAVQSSNGTNTAENQS | LSQANQTPQMV |
| 72] | ALQKEFAELQEQIDYIAKNTEFN | |
| | DKNLLAGTGAVTIGSTSISGAEIS | |
| | IETL | |
| Flagellin | MNVSMNRLSSGKRINSAADDA | LNTALNTVAGNRATLG |
| N-SEQ ID NO: 220 | AGLAIATRMRARQSGLEKASQN | ATLNRLDRNVENLNNQ |
| C-SEQ ID NO: 221 | TQDGMSLIRTAESAMNSVSNILT | ATNMASAASQIEDADM |
| Bacillus anthracis strain | RMRDIAVQSSNGTNTAENQSAL | AKEMSEMTKFKILNEA |
| H9401 | QKEFAELQEQIDYIAKNTEFNDK | GISMLSQANQTPQMVS |
| [CDS of SEQ ID NO: | NLLAGTGAVTIGSTSISGAEISIE | KLLQ |
| 73] | TL | |
| Flagellin | MRINHNITALNTYRQFNNANNA | IIDGAINQVSEQRSGLG |
| N-SEQ ID NO: 222 | QAKSMEKLSSGQRINSASDDAA | ATQNRLDHTINNLSTSS |
| C-SEQ ID NO: 223 | GLAISEKMRGQIRGLDQASRNA | ENLTASESRIRDVDYAL |
| Bacillus megaterium | QDGVSLIQTAEGALNETHDILQR | AA |
| strain WSH-002 | MRELVVQAGNGTNKTEDLDAI | |
| [CDS of SEQ ID NO: | QDEIGSLIEEIGGEADSKGISDRA | |
| 74] | QFNGRNLLDGSLDITLQVGA | |
| Flagellin | MRINHNLPALNAYRNLAQNQIG | FKAAIDQVSRIRSYFGAI |
| N-SEQ ID NO: 224 | TSKILERLSSGYRINRASDDAAG | QNRLEHVVNNLSNYTE |
| C-SEQ ID NO: 225 | LAISEKMRGQIRGLEQGQRNTM | NLTGAESRIRDADMAK |
| Aneurinibacillus sp. XH2 | DGVSLIQTAEGALQEIHEMLQR | EMTEFTRFNIINQSATA |
| [CDS of SEQ ID NO: | MRELAVQAANGTYSDKDKKAI | MLAQANQLPQGVLQLL |
| 75] | EDEINQLTAQIDQIAKTTEFNGIQ | KG |
| | LIGDSDSTSLQDVK | |

[0152] The amino acid sequence of the flagellin or flagellin-associated polypeptide used in the compositions and methods herein can comprise any one of SEQ ID NOs: 226-300, or any combination thereof.

[0153] The amino acid sequence of the flagellin or flagellin-associated polypeptide used in the compositions and methods herein can comprise SEQ ID NO: 226 or 571.

[0154] The amino acid sequence of the flagellin or flagellin-associated polypeptide used in the compositions and methods herein can comprise SEQ ID NO: 590.

[0155] The amino acid sequence of the flagellin or flagellin-associated polypeptide used in the compositions and methods herein can comprise any one of SEQ ID NOs: 301-375, and 587 or any combination thereof.

[0156] The amino acid sequence of the flagellin or flagellin-associated polypeptide used in the compositions and methods herein can comprise SEQ ID NO: 301.

[0157] The flagellin-derived polypeptide sequence for Bt4Q7Flg22 (SEQ ID NO: 226) was identified from a proprietary “in house” library from Bacillus thuringiensis (Bt.) strain 4Q7. Conserved primers to full length flagellin from E. coli were used to screen the Bt.4Q7 strain library and identify a functional flagellin-associated bioactive priming Flg22 polypeptide.

TABLE 3
Flagellin polypeptides Flg22 and FlgII-28 identified
from Bacillus spp.

| SEQ ID NO: | Peptide Flg22 |
|---|---|
| Flg22-Bt.4Q7 | DRLSSGKRINSASDDAAGLAIA |
| SEQ ID NO: 226 | |
| Bacillus thuringiensis | |
| strain 4Q7 | |
| Flg22 | DRLSSGKRINSASDDAAGLAIA |
| SEQ ID NO: 227 | |
| Bacillus thuringiensis, strain | |
| HD1002 | |
| Flg22 | DRLSSGKRINSASDDAAGLAIA |
| SEQ ID NO: 228 | |
| Bacillus thuringiensis, strain | |
| HD-789 | |
| Flg22 | DRLSSGKRINSASDDAAGLAIA |
| SEQ ID NO: 229 | |
| Bacillus cereus | |
| strain G9842 | |
| Flg22 | EHLATGKKLNNASDNPANIAIV |
| SEQ ID NO: 230 | |
| Bacillus thuringiensis serovar indiana | |
| strain HD521 | |
| Flg22 | DRLSSGKRINNASDDAAGLAIAT |
| SEQ ID NO: 231 | |
| Bacillus thuringiensis strain CTC | |
| Flg22 | DRLSSGKRINNASDDAAGLAIA |
| SEQ ID NO: 232 | |
| Bacillus thuringiensis serovar | |
| yunnanensis strain IEBC-T20001 | |
| Flg22 | DRLSSGKRINNASDDAAGLAIA |
| SEQ ID NO: 233 | |
| Bacillus thuringiensis serovar tolworthi | |
| Flg22 | DRLSSGKRINNASDDAAGLAIA |
| SEQ ID NO: 234 | |
| Bacillus cereus strain FM1 | |
| Flg22 | EHLATGKKLNHASDNPANVAIV |
| SEQ ID NO: 235 | |
| Bacillus cereus strain FM1 | |
| Flg22 | DRLSSGKRINNASDDAAGLAIA |
| SEQ ID NO: 236 | |
| Bacillus thuringiensis strain MC28 | |
| Flg22 | DRLSSGKRINNASDDAAGLAIA |
| SEQ ID NO: 237 | |
| Bacillus bombysepticus | |
| strain Wang | |
| Flg22 | DRLSSGKRINNASDDAAGLAIA |
| SEQ ID NO: 238 | |
| Bacillus thuringiensis serovar kenyae | |
| Flg22 | DRLSSGKRINNASDDAAGLAIA |
| SEQ ID NO: 239 | |
| Bacillus thuringiensis serovar kenyae | |
| Flg22 | DRLSSGKRINNASDDAAGLAIA |
| SEQ ID NO: 240 | |
| Bacillus cereus | |
| Flg22 | EHLATGKKLNNASDNPANIAIV |
| SEQ ID NO: 241 | |
| Bacillus cereus | |
| Flg22 | EHLATGKKLNHASDNPANVAIV |
| SEQ ID NO: 242 | |
| Bacillus thuringiensis serovar finitimus | |
| strain YBT-020 | |
| Flg22 | DRLSSGKRINNASDDAAGLAIA |
| SEQ ID NO: 243 | |
| Bacillus thuringiensis serovar finitimus | |
| strain YBT-020 | |
| Flg22 | DRLSSGKRINNASDDAAGLAIA |
| SEQ ID NO: 244 | |
| Bacillus cereus stain B4264 | |
| Flg22 | DRLSSGKRINNASDDAAGLAIA |
| SEQ ID NO: 245 | |
| Bacillus thuringiensis serovar nigeriensis | |
| Flg22 | DRLSSGKRINNASDDAAGLAIA |
| SEQ ID NO: 246 | |
| Bacillus thuringiensis | |
| Flg22 | EHFATGKKLNHASDNPANVAIV |
| SEQ ID NO: 247 | |
| Bacillus thuringiensis serovar konkukian | |
| strain 97-27 | |
| Flg22 | DRLSSGKRINNASDDAAGLAIA |
| SEQ ID NO: 248 | |
| Bacillus thuringiensis serovar konkukian | |
| strain 97-27 | |
| Flg22 | EHLATGKKLNHASDNPANIVIV |
| SEQ ID NO: 249 | |
| Bacillus thuringiensis serovar | |
| thuringiensis strain IS5056 | |
| Flg22 | DRLSSGKRINNASDDAAGLAIA |
| SEQ ID NO: 250 | |
| Bacillus thuringiensis serovar | |
| thuringiensis strain IS5056 | |
| Flg22 | DRLSSGKRINNASDDAAGLAIA |
| SEQ ID NO: 251 | |
| Bacillus thuringiensis | |
| strain Bt407 | |
| Flg22 | DRLSSGKRINNASDDAAGLAIA |
| SEQ ID NO: 252 | |
| Bacillus thuringiensis serovar chinensis | |
| CT-43 | |
| Flg22 | DRLSSGKRINNASDDAAGLAIA |
| SEQ ID NO: 253 | |
| Bacillus thuringiensis serovar canadensis | |
| Flg22 | DRLSSGKRINNASDDAAGLAIA |
| SEQ ID NO: 254 | |
| Bacillus thuringiensis serovar galleriae | |
| Flg22 | DRLSSGKRINNASDDAAGLAIA |
| SEQ ID NO: 255 | |
| Bacillus weihenstephanensis | |
| Flg22 | DRLSSGKRINNASDDAAGLAIA |
| SEQ ID NO: 256 | |
| Bacillus thuringiensis serovar ostriniae | |
| Flg22 | EHLATGKKLNHASDNPANVAIV |
| SEQ ID NO: 257 | |
| Bacillus thuringiensis | |
| Flg22 | DRLSSGKRINNASDDAAGLAIA |
| SEQ ID NO: 258 | |
| Bacillus thuringiensis | |
| Flg22 | DRLSSGKRINNASDDAAGLAIA |
| SEQ ID NO: 259 | |
| Bacillus thuringiensis serovar | |
| pondicheriensis | |
| Flg22 | EHLATGKKLNHASDNPANIVIV |
| SEQ ID NO: 260 | |
| Bacillus thuringiensis serovar Berliner | |
| Flg22 | DRLSSGKRINNASDDAAGLAIA |
| SEQ ID NO: 261 | |
| Bacillus thuringiensis serovar Berliner | |
| Flg22 | EHLATGKKLNHASNNPANVAIV |
| SEQ ID NO: 262 | |
| Bacillus cereus strain Q1 | |
| Flg22 | DRLSSGKRINNASDDAAGLAIA |
| SEQ ID NO: 263 | |
| Bacillus cereus strain Q1 | |
| Flg22 | EHLATGKKLNHASDNPANIAIV |
| SEQ ID NO: 264 | |
| Bacillus thuringiensis serovar morrisoni | |
| Flg22 | DRLSSGKRINNASDDAAGLAIA |
| SEQ ID NO: 265 | |
| Bacillus thuringiensis serovar neoleonensis | |
| Flg22 | DRLSSGKRINNASDDAAGLAIA |
| SEQ ID NO: 266 | |
| Bacillus thuringiensis serovar morrisoni | |
| Flg22 | DRLSSGKRINNASDDAAGLAIA |
| SEQ ID NO: 267 | |
| Bacillus thuringiensis serovar morrisoni | |
| Flg22 | DRLSSGKRINNASDDAAGLAIA |
| SEQ ID NO: 268 | |
| Bacillus thuringiensis serovar jegathesan | |
| Flg22 | DRLSSGKRINNASDDAAGLAIA |
| SEQ ID NO: 269 | |
| Bacillus cereus stain ATCC 10987 | |
| Flg22 from Flagellin A | DRLSSGKRINNASDDAAGLAIA |
| SEQ ID NO: 270 | |
| Bacillus thuringiensis serovar monterrey | |
| Flg22 | EHLATGKKLNNASDNPANIAIV |
| SEQ ID NO: 271 | |
| Bacillus cereus strain NC7401 | |
| Flg22 | DRLSSGKRINNASDDAAGLAIA |
| SEQ ID NO: 272 | |
| Bacillus cereus strain NC7401 | |
| Flg22 | DRLSSGKRINNASDDAAGLAIA |
| SEQ ID NO: 273 | |
| Bacillus cereus strain AH820 | |
| Flg22 | DRLSSGKRINNASDDAAGLAIA |
| SEQ ID NO: 274 | |
| Bacillus cereus AH187 | |
| Flg22 | DRLSSGKRINNASDDAAGLAIA |
| SEQ ID NO: 275 | |
| Bacillus cereus | |
| Flg22 | DRLSSGKRINNASDDAAGLAIA |
| SEQ ID NO: 276 | |
| Bacillus cereus | |
| Flg22 | DRLSSGKRINNASDDAAGLAIA |
| SEQ ID NO: 277 | |
| Bacillus thuringiensis | |
| Strain HD-771 [51] | |
| Flg22 | DRLSSGKRINNASDDAAGLAIA |
| SEQ ID NO: 278 | |
| Bacillus thuringiensis serovar sotto [52] | |
| Flg22 | DRLSSGKRINNASDDAAGLAIA |
| SEQ ID NO: 279 | |
| Bacillus thuringiensis serovar Novosibirsk | |
| Flg22 | DRLSSGKRINNASDDAAGLAIA |
| SEQ ID NO: 280 | |
| Bacillus thuringiensis serovar londrina | |
| Flg22 | EHLATGKKLNHASNNPANIAIV |
| SEQ ID NO: 281 | |
| Bacillus cereus strain E33L | |
| Flg22 | DRLSSGKRINNASDDAAGLAIA |
| SEQ ID NO: 282 | |
| Bacillus cereus strain E33L | |
| Flg22 | DRLSSGKRINNASDDAAGLAIA |
| SEQ ID NO: 283 | |
| Bacillus cereus | |
| strain FRI-35 | |
| Flg22 | EHLATGKKLNNASDNPANIAIV |
| SEQ ID NO: 284 | |
| Bacillus cereus strain FRI-35 | |
| Flg22 | DRLSSGKRINNASDDAAGLAIA |
| SEQ ID NO: 285 | |
| Bacillus thuringiensis | |
| Flg22 | DRLSSGKRINNASDDAAGLAIA |
| SEQ ID NO: 286 | |
| Bacillus cereus strain ATCC 4342 | |
| Flg22 | EHLATGKKLNHASDNPANIAIV |
| SEQ ID NO: 287 | |
| Bacillus thuringiensis | |
| Flg22 | DRLSSGKRINNASDDAAGLAIA |
| SEQ ID NO: 288 | |
| Bacillus thuringiensis | |
| Flg22 | EKLSSGQRINSASDDAAGLAIS |
| SEQ ID NO: 289 | |
| Bacillus aryabhattai | |
| Flg22 | NRLSSGKQINSASDDAAGLAIA |
| SEQ ID NO: 290 | |
| Bacillus manliponensis | |
| Flg22 | LRLSSGYRINSAADDAAGLAIS |
| SEQ ID NO: 291 | |
| Lysinibacillus sp. strain BF-4 | |
| Flg22 | LRLSSGYRINSAADDAAGLAIS |
| SEQ ID NO: 292 | |
| Lysinibacillus sp. strain 13S34_air | |
| Flg22 | GKLSSGLRINGASDDAAGLAIS |
| SEQ ID NO: 293 | |
| Paenibacillus sp. strain HWS67 | |
| Flg22 | DRLSSGKRINNASDDAAGLAIA |
| SEQ ID NO: 294 | |
| Bacillus anthracis | |
| Flg22 | NRLSSGKRINSAADDAAGLAIA |
| SEQ ID NO: 295 | |
| Bacillus anthracis | |
| Flg22 | NRLSSGKRINSAADDAAGLAIA |
| SEQ ID NO: 296 | |
| Bacillus anthracis | |
| Flg22 | NRLSSGKRINSAADDAAGLAIA |
| SEQ ID NO: 297 | |
| Bacillus anthracis | |
| Flg22 | NRLSSGKRINSAADDAAGLAIA |
| SEQ ID NO: 298 | |
| Bacillus anthracis strain H9401 | |
| Flg22 | EKLSSGQRINSASDDAAGLAIS |
| SEQ ID NO: 299 | |
| Bacillus megaterium strain WSH-002 | |
| Flg22 | ERLSSGYRINRASDDAAGLAIS |
| SEQ ID NO: 300 | |
| Aneurinibacillus sp. XH2 | |
| SEQ ID NO: | Peptide Flg15 |
| Flg15-Bt4Q7 | RINSAKDDAAGLAIA |
| SEQ ID NO: 590 | |
| Modified FLG15-Bt4Q7; Syn01 | |
| Bacillus thuringiensis strain 4Q7 | |
| SEQ ID NO: | Peptide FglI-28 |
| FlgII-28-Bt.4Q7 | SVSNILLRMRDLANQSANGTNTKGNQAS |
| SEQ ID NO: 301 | |
| Bacillus thuringiensis | |
| strain 4Q7 | |
| FlgII-28 | SVSNILLRMRDLANQSANGTNTKGNQAS |
| SEQ ID NO: 302 | |
| Bacillus thuringiensis, strain | |
| HD1002 | |
| FlgII-28 | SVSNILLRMRDLANQSANGTNTKGNQAS |
| SEQ ID NO: 303 | |
| Bacillus thuringiensis, strain | |
| HD-789 | |
| FlgII-28 | SVSNILLRMRDLANQSANGTNTKGNQAS |
| SEQ ID NO: 304 | |
| Bacillus cereus | |
| strain G9842 | |
| FlgII-28 | TVTNILQRMRDLAVQSANGTNSNKNRHS |
| SEQ ID NO: 305 | |
| Bacillus thuringiensis serovar indiana | |
| strain HD521 | |
| FlgII-28 | SVSNILLRMRDIANQSANITNTNENKSA |
| SEQ ID NO: 306 | |
| Bacillus thuringiensis strain CTC | |
| FlgII-28 | SVSNILLRMRDLANQSANGTNTDDNQKA |
| SEQ ID NO: 307 | |
| Bacillus thuringiensis | |
| serovar yunnanensis strain IEBC-T20001 | |
| FlgII-28 | SVSNILLRMRDLANQSANGTNTDENKAA |
| SEQ ID NO: 308 | |
| Bacillus thuringiensis serovar tolworthi | |
| FlgII-28 | SVSNILLRMRDIANQSANGTNTDKNQVA |
| SEQ ID NO: 309 | |
| Bacillus cereus strain FM1 | |
| FlgII-28 | TVTNILQRMRDVAVQSANGTNSNKNRDS |
| SEQ ID NO: 310 | |
| Bacillus cereus strain FM1 | |
| FlgII-28 | SVSNILLRMRDIANQSANGTNTADNQQA |
| SEQ ID NO: 311 | |
| Bacillus thuringiensis strain MC28 | |
| FlgII-28 | SVSNILLRMRDLANQSASGTNTDKNQAA |
| SEQ ID NO: 312 | |
| Bacillus bombysepticus strain Wang | |
| FlgII-28 | SVSNILLRMRDLANQSASGTNTDKNQAA |
| SEQ ID NO: 313 | |
| Bacillus thuringiensis serovar kenyae | |
| FlgII-28 | SVSNILLRMRDLANQSASGTNTDKNQAA |
| SEQ ID NO: 314 | |
| Bacillus thuringiensis serovar kenyae | |
| FlgII-28 | SVSNILLRMRDLANQSANGTNTGDNQKA |
| SEQ ID NO: 315 | |
| Bacillus cereus | |
| FlgII-28 | TNILQRMRDLAVQSANGTNSNKNRDSLN |
| SEQ ID NO: 316 | |
| Bacillus cereus | |
| FlgII-28 | TNVLQRMRDVAVQSANGTNLNKNRDSLN |
| SEQ ID NO: 317 | |
| Bacillus thuringiensis serovar finitimus | |
| strain YBT-020 | |
| FlgII-28 | SVSNILLRMRDIANQSANGTNTDSNKSA |
| SEQ ID NO: 318 | |
| Bacillus thuringiensis serovar finitimus | |
| strain YBT-020 | |
| FlgII-28 | SVSNILLRMRDLANQSANGTNTAENKAA |
| SEQ ID NO: 319 | |
| Bacillus cereus stain B4264 | |
| FlgII-28 | SVSNILLRMRDIANQSANGTNTSDNQKA |
| SEQ ID NO: 320 | |
| Bacillus thuringiensis serovar nigeriensis | |
| FlgII-28 | SVSNILLRMRDIANQSANGTNTADNQQA |
| SEQ ID NO: 321 | |
| Bacillus thuringiensis | |
| FlgII-28 | TVMNILQRMRDLAVQSANGTNSNKNRDS |
| SEQ ID NO: 322 | |
| Bacillus thuringiensis serovar konkukian | |
| strain 97-27 | |
| FlgII-28 | SVSNILLRMRDIANQSANGTNTADNQQA |
| SEQ ID NO: 323 | |
| Bacillus thuringiensis serovar konkukian | |
| strain 97-27 | |
| FlgII-28 | TVTNILQHMRDFAIQSANGTNSNTNRDS |
| SEQ ID NO: 324 | |
| Bacillus thuringiensis serovar thuringiensis | |
| strain IS5056 | |
| FlgII-28 | SVSNILLRMRDISNQSANGTNTDKNQSA |
| SEQ ID NO: 325 | |
| Bacillus thuringiensis serovar thuringiensis | |
| strain IS5056 | |
| FlgII-28 | SVSNILLRMRDISNQSANGTNTDKNQSA |
| SEQ ID NO: 326 | |
| Bacillus thuringiensis | |
| strain Bt407 | |
| FlgII-28 | SVSNILLRMRDISNQSANGTNTDKNQSA |
| SEQ ID NO: 327 | |
| Bacillus thuringiensis serovar chinensis | |
| CT-43 | |
| FlgII-28 | SVSNILLRMRDLANQSANGTNTNENQAA |
| SEQ ID NO: 328 | |
| Bacillus thuringiensis serovar canadensis | |
| FlgII-28 | SVSNILLRMRDLANQSANGTNTNENQAA |
| SEQ ID NO: 329 | |
| Bacillus thuringiensis serovar galleriae | |
| FlgII-28 | SVSNILLRMRDLSNQSANGTNTDENQQA |
| SEQ ID NO: 330 | |
| Bacillus weihenstephanensis | |
| FlgII-28 | SVSNILLRMRDIANQSANGTNTGDNQKA |
| SEQ ID NO: 331 | |
| Bacillus thuringiensis serovar ostriniae | |
| FlgII-28 | TVANILQRMRDLAVQSSNDTNSNKNRDS |
| SEQ ID NO: 332 | |
| Bacillus thuringiensis | |
| FlgII-28 | SVSNILLRMRDLANQSANGTNTDDNQKA |
| SEQ ID NO: 333 | |
| Bacillus thuringiensis | |
| FlgII-28 | SVSNILLRMRDLANQSANGTNTDDNQKA |
| SEQ ID NO: 334 | |
| Bacillus thuringiensis serovar | |
| pondicheriensis | |
| FlgII-28 | TVTNILQHMRDFAIQSANGTNSNTNRDS |
| SEQ ID NO: 335 | |
| Bacillus thuringiensis serovar Berliner | |
| FlgII-28 | SVSNILLRMRDISNQSANGTNTDKNQSA |
| SEQ ID NO: 336 | |
| Bacillus thuringiensis serovar Berliner | |
| FlgII-28 | TVTNVLQRMRDVAVQSANGTNSSKNRDS |
| SEQ ID NO: 337 | |
| Bacillus cereus strain Q1 | |
| FlgII-28 | SVSNILLRMRDIANQSANGTNTDKNQVA |
| SEQ ID NO: 338 | |
| Bacillus cereus strain Q1 | |
| FlgII-28 | TVMNILQRMRDLAIQSANSTNSNKNRDS |
| SEQ ID NO: 339 | |
| Bacillus thuringiensis serovar morrisoni | |
| FlgII-28 | SVSNILLRMRDIANQSANGTNTSDNQKA |
| SEQ ID NO: 340 | |
| Bacillus thuringiensis serovar neoleonensis | |
| FlgII-28 | SVSNILLRMRDIANQSANGTNTGDNQKA |
| SEQ ID NO: 341 | |
| Bacillus thuringiensis serovar morrisoni | |
| FlgII-28 | SVSNILLRMRDIANQSANGTNTGDNQKA |
| SEQ ID NO: 342 | |
| Bacillus thuringiensis serovar morrisoni | |
| FlgII-28 | SVSNILLRMRDIANQSANGTNTNGNQAA |
| SEQ ID NO: 343 | |
| Bacillus thuringiensis serovar jegathesan | |
| FlgII-28 | SVSNILLRMRDIANQSANGTNTDKNQAA |
| SEQ ID NO: 344 | |
| Bacillus cereus stain ATCC 10987 | |
| FlgII-28 from Flagellin A | SVSNILLRMRDLANQSANGTNTNENQAA |
| SEQ ID NO: 345 | |
| Bacillus thuringiensis serovar monterrey | |
| FlgII-28 | TVTNVLQRMRDLAVQSANDTNSNKNRDS |
| SEQ ID NO: 346 | |
| Bacillus cereus strain NC7401 | |
| FlgII-28 | SVSNILLRMRDLANQSANGTNTNENKAA |
| SEQ ID NO: 347 | |
| Bacillus cereus strain NC7401 | |
| FlgII-28 | SVSNILLRMRDLANQSANGTNTSDNQAA |
| SEQ ID NO: 348 | |
| Bacillus cereus strain AH820 | |
| FlgII-28 | SVSNILLRMRDLANQSANGTNTNENKAA |
| SEQ ID NO: 349 | |
| Bacillus cereus AH187 | |
| FlgII-28 | SVSNILLRMRDLANQSANGTNTNENKAA |
| SEQ ID NO: 350 | |
| Bacillus cereus | |
| FlgII-28 | SVSNILLRMRDIANQSANGTNTGDNQKA |
| SEQ ID NO: 351 | |
| Bacillus cereus | |
| FlgII-28 | SVSNILLRMRDLANQSASETNTSKNQAA |
| SEQ ID NO: 352 | |
| Bacillus thuringiensis | |
| Strain HD-771 [51] | |
| FlgII-28 | SVSNILLRMRDLANQSASETNTSKNQAA |
| SEQ ID NO: 353 | |
| Bacillus thuringiensis serovar sotto [52] | |
| FlgII-28 | SVSNILLRMRDIANQSANGTNTGDNQKA |
| SEQ ID NO: 354 | |
| Bacillus thuringiensis serovar Novosibirsk | |
| FlgII-28 | SVSNILLRMRDLANQSANGTNTSENQAA |
| SEQ ID NO: 355 | |
| Bacillus thuringiensis serovar londrina | |
| FlgII-28 | TVTNILQRMRDLAVQSANVTNSNKNRNS |
| SEQ ID NO: 356 | |
| Bacillus cereus strain E33L | |
| FlgII-28 | SVSNILLRMRDLANQSANGTNTDKNQGA |
| SEQ ID NO: 357 | |
| Bacillus cereus strain E33L | |
| FlgII-28 | SVSNILLRMRDLANQSANGTNTDKNQAA |
| SEQ ID NO: 358 | |
| Bacillus cereus | |
| strain FRI-35 | |
| FlgII-28 | TVTNVLQRMRDLAVQSANGTNSNKNRDS |
| SEQ ID NO: 359 | |
| Bacillus cereus strain FRI-35 | |
| FlgII-28 | SVSNILLRMRDIANQTANGTNKDTDIEA |
| SEQ ID NO: 360 | |
| Bacillus thuringiensis | |
| FlgII-28 | SVSNILLRMRDIANQTANGTNKDTDIEA |
| SEQ ID NO: 361 | |
| Bacillus cereus strain ATCC 4342 | |
| FlgII-28 | TVMNILQRMRDLAIQSANSTNSNKNRDS |
| SEQ ID NO: 362 | |
| Bacillus thuringiensis | |
| FlgII-28 | SVSNILLRMRDIANQSANGTNTGDNQKA |
| SEQ ID NO: 363 | |
| Bacillus thuringiensis | |
| FlgII-28 | ETHDILQRMRELVVQAGNGTNKTEDLDA |
| SEQ ID NO: 364 | |
| Bacillus aryabhattai | |
| FlgII-28 | SVSNILLRMRDLATQSATGTNQGNDRES |
| SEQ ID NO: 365 | |
| Bacillus manliponensis | |
| FlgII-28 | ETHAIVQRMRELAVQAATDTNTDDDRAK |
| SEQ ID NO: 366 | |
| Lysinibacillus sp. strain BF-4 | |
| FlgII-28 | ETHAIVQRMRELAVQAATDTNTDDDRAK |
| SEQ ID NO: 367 | |
| Lysinibacillus sp. strain 13S34_air | |
| FlgII-28 | EIHSMLQRMNELAVQASNGTYSGSDRLN |
| SEQ ID NO: 368 | |
| Paenibacillus sp. strain HW567 | |
| FlgII-28 | SVSNILLRMRDLANQSANGTNTKENQDA |
| SEQ ID NO: 369 | |
| Bacillus anthracis | |
| FlgII-28 | SVSNILTRMRDIAVQSSNGTNTAENQSA |
| SEQ ID NO: 370 | |
| Bacillus anthracis | |
| FlgII-28 | SVSNILTRMRDIAVQSSNGTNTAENQSA |
| SEQ ID NO: 371 | |
| Bacillus anthracis | |
| FlgII-28 | SVSNILTRMRDIAVQSSNGTNTAENQSA |
| SEQ ID NO: 372 | |
| Bacillus anthracis | |
| FlgII-28 | SVSNILTRMRDIAVQSSNGTNTAENQSA |
| SEQ ID NO: 373 | |
| Bacillus anthracis strain H9401 | |
| FlgII-28 | ETHDILQRMRELVVQAGNGTNKTEDLDA |
| SEQ ID NO: 374 | |
| Bacillus megaterium strain WSH-002 | |
| FlgII-28 | EIHEMLQRMRELAVQAANGTYSDKDKKA |
| SEQ ID NO: 375 | |
| Aneurinibacillus sp. XH2 | |

[0158] Retro-Inverso Flagellin-Associated Polypeptides

[0159] Bioactive Flg polypeptide(s) useful for the bioactive priming compositions or methods herein can be created in a non-natural isomeric or retro-inverso (RI) form and used in the compositions and methods herein.

[0160] The retro-inverso Flg polypeptides can exhibit enhanced binding affinity for the FLS receptor protein(s). Plant flagellin receptors, like FLS2, can recognize a retro inverso Flg polypeptide fragment such as either Flg22 or FlgII-28 located within the N-terminal conserved domain of flagellin. The retro-inverso forms of these Flg polypeptides are provided as biologically active forms, which can recognize and interact with the Flg-associated or FLS receptor protein on the surface of the plant cell membrane.

[0161] Retro-inverso Flg polypeptides can possess an increased activity and stability to proteolytic degradation at the plant membrane surface. For example, retro inverso forms of Bacillus Flg22 or FlgII-28 polypeptides can increase activity and stability of the Flg polypeptide(s) and increase protection against proteolytic degradation at the plant surface or root surface. The retro inverso forms also exhibit enhanced stability when applied in a field, or on or in a soil.

[0162] Retro-inverso polypeptides are topological mirror images of the native structures of the parent polypeptide. Retro inverso synthetic forms of the polypeptide sequences are created by reversing the polypeptide sequences and using retro-all-D or retro-enantio-peptides. The all D-chain amino acid Flg polypeptide(s) adopts a “mirror image” of the three-dimensional structure of its related L-peptide or L-chain amino.

[0163] This is further accomplished by creating a retro-inverso alteration of any of the parent Flg polypeptide derived from Bacillus or other Eubacteria in Table 3. Retro-inverso polypeptides that were designed to the Flg22 (RI Flg22: SEQ ID NOs: 376-450), and FlgII-28 (RI-FlgII-28: SEQ ID NOs: 451-525) are provided in Table 4. Retro inverso forms of Ec.Flg22 (SEQ ID NO: 526) and Ec.Flg15 (SEQ ID NO: 529) as provided in Table 5 were also created from E. coli derived sequences.

[0164] Any of the flagellin-associated bioactive priming polypeptides comprising Bacillus or from other Eubacteria Flg22 or FlgII-28 polypeptides in Table 3 can be used in their retro-inversed forms (Table 4) in the compositions and methods herein.

[0165] Retro inverso forms of the Flg bioactive priming polypeptides as referenced herein can be provided in any of three forms where the inversion of amino acid chirality contains the normal-all-D (inverso), all-L (retro) and/or retro-all-D (retro-inverso) or a combination of these forms to achieve the desired phenotypes in a plant.

[0166] The Bacillus-derived L-Flg22 and L-FlgII-28 polypeptides in Table 3 and the E.c. native L-Flg22 and L-Flg15 polypeptides in Table 5 were synthetically generated via retro-inverso engineering to form retro-inverso D-Flg22 polypeptide (SEQ ID NO: 376-450), D-FlgII-28 (SEQ ID NO: 451-525), and E.c. D-Flg22 polypeptide (SEQ ID NO: 527, 529).

[0167] The inversion of amino acid chirality (all-L to all-D) for Bt.4Q7 Flg22 (SEQ ID NO: 376), which is provided as a small linear polypeptide fragment and is referred to as a retro inverso modification was achieved by a reversal of the direction of the polypeptide backbone and described below.

(DADIADLDGDADADDDDDSDADSDNDIDRDKDGDSDSDLDRDD)

[0168] The retro inverso all D-chain amino acid Flg22 polypeptide adopts a “mirror image” of the three-dimensional structure of its related native L-Bt.4Q7Flg 22 polypeptide and this all L-chain has an equivalent mirror image to the all D Bt.4Q7Flg22 polypeptide. All L-amino acid residues are replaced by their D-enantiomers leading to all D-peptides or retro all D-isomer-peptides containing amide linkages. The native L-amino acid chain form of Bt.4Q7 Flg22 polypeptide chain reversed to generate the retro-inverso synthetic all-D confirmation that is prepared by replacing all the L-amino acid residues with their corresponding D-enantiomers.

[0169] FIG. 1 provides a diagrammatic representation of a natural (all L) Bt.4Q7 Flg22 and its retro inverso or mirror image to form an all D Bt.4Q7 Flg22 enantiomeric polypeptide. The retro-inverso Flg polypeptide that corresponds to Bt.4Q7 Flg22 (SEQ ID NO: 226) is described as SEQ ID NO: 376.

[0170] In the case of short polypeptides, such as Flg22, Flg15 and FlgII-28, the mirroring of the side chain positions in a conformational change from L-to-D conversion states results in a mirroring of symmetry transformations of the side chains as well.

[0171] Retro-all-D analogues have been found to possess biological activity (Guptasarma, “Reversal of peptide backbone direction may result in mirroring of protein structure, FEBS Letters 310: 205-210, 1992). The retro-inverso D-Flg polypeptide(s) can assume a side chain topology in its extended conformation that is similar to a corresponding native L-Flg polypeptide sequence, thus emulating biological activities of the native L-parent molecule while fully resistant to proteolytic degradation thus increasing stability when the polypeptide contacts the plant or the surrounding environment.

[0172] Retro-inverso Flg bioactive priming polypeptides are described in Table 4 or Table 5. Retro inverso Flg-associated bioactive priming polypeptides provided in Table 4 were selected for their enhanced activity and stability and their ability to survive under varying conditions and environments. Based on their D enantiomer nature, they are more resistant to proteolytic degradation and can survive and exist in harsher environmental conditions.

TABLE 4
Retro-inverso flagellin polypeptides from Flg22
and FlgII-28 from Bacillus

| SEQ ID NO: | Peptide Flg22 |
|---|---|
| RI Bt.4Q7Flg22 | AIALGAADDSASNIRKGSSLRD |
| SEQ ID NO: 376 | |
| Bacillus thuringiensis | |
| strain 4Q7 | |
| RI Flg22 | AIALGAADDSASNIRKGSSLRD |
| SEQ ID NO: 377 | |
| Bacillus thuringiensis, strain | |
| HD1002 | |
| RI Flg22 | AIALGAADDASNIRKGSSLRD |
| SEQ ID NO: 378 | |
| Bacillus thuringiensis, strain | |
| HD-789 | |
| RI Flg22 | AIALGAADDSASNIRKGSSLRD |
| SEQ ID NO: 379 | |
| Bacillus cereus | |
| strain G9842 | |
| RI Flg22 | VIANAPNDSANNLKKGTALHE |
| SEQ ID NO: 380 | |
| Bacillus thuringiensis serovar indiana | |
| strain HD521 | |
| RI Flg22 | TAIAGAADDSANNIRKGSSLRD |
| SEQ ID NO: 381 | |
| Bacillus thuringiensis strain CTC | |
| RI Flg22 | AIALGAADDSANNIRKGSSLRD |
| SEQ ID NO: 382 | |
| Bacillus thuringiensis | |
| serovaryunnanensis strain IEBC-T20001 | |
| RI Flg22 | AIALGAADDSANNIRKGSSLRD |
| SEQ ID NO: 383 | |
| Bacillus thuringiensis serovar tolworthi | |
| RI Flg22 | AIALGAADDSANNIRKGSSLRD |
| SEQ ID NO: 384 | |
| Bacillus cereus strain FM1 | |
| RIFlg22 | VIAVNAPNDSAHNLKKGTALHE |
| SEQ ID NO: 385 | |
| Bacillus cereus strain FM1 | |
| RI Flg22 | AIALGAADDSANNIRKGSSLRD |
| SEQ ID NO: 386 | |
| Bacillus thuringiensis strain MC28 | |
| RI Flg22 | AIALGAADDSANNIRKGSSLRD |
| SEQ ID NO: 387 | |
| Bacillus bombysepticus | |
| strain Wang | |
| RI Flg22 | AIALGAADDSANNIRKGSSLRD |
| SEQ ID NO: 388 | |
| Bacillus thuringiensis serovar kenyae | |
| RI Flg22 | AIALGAADDSANNIRKGSSLRD |
| SEQ ID NO: 389 | |
| Bacillus thuringiensis serovar kenyae | |
| RI Flg22 | AIALGAADDSANNIRKGSSLRD |
| SEQ ID NO: 390 | |
| Bacillus cereus | |
| RI Flg22 | VIAINAPNDASNNLKKGTALHE |
| SEQ ID NO: 391 | |
| Bacillus cereus | |
| RI Flg22 | VIANAPNDSAHNLKKGTALHE |
| SEQ ID NO: 392 | |
| Bacillus thuringiensis serovar finitimus | |
| strain YBT-020 | |
| RI Flg22 | AIALGAADDSANNIRKGSSLRD |
| SEQ ID NO: 393 | |
| Bacillus thuringiensis serovar finitimus | |
| strain YBT-020 | |
| RI Flg22 | AIALGAADDSANNIRKGSSLRD |
| SEQ ID NO: 394 | |
| Bacillus cereus stain B4264 | |
| RI Flg22 | AIALGAADDSANNIRKGSSLRD |
| SEQ ID NO: 395 | |
| Bacillus thuringiensis serovar nigeriensis | |
| RI Flg22 | AIALGAADDSANNIRKGSSLRD |
| SEQ ID NO: 396 | |
| Bacillus thuringiensis | |
| RI Flg22 | VIANAPNDSAHNLKKGTAFHE |
| SEQ ID NO: 397 | |
| Bacillus thuringiensis serovar konkukian | |
| strain 97-27 | |
| RI Flg22 | AIALGAADDSANNRKGSSLRD |
| SEQ ID NO: 398 | |
| Bacillus thuringiensis serovar konkukian | |
| strain 97-27 | |
| RI Flg22 | VIVINAPNDSAHNLKKGTALHE |
| SEQ ID NO: 399 | |
| Bacillus thuringiensis serovar thuringiensis | |
| strain IS5056 | |
| RI Flg22 | AIALGAADDSANNIRKGSSLRD |
| SEQ ID NO: 400 | |
| Bacillus thuringiensis serovar thuringiensis | |
| strain IS5056 | |
| RI Flg22 | AIALGAADDSANNIRKGSSLRD |
| SEQ ID NO: 401 | |
| Bacillus thuringiensis | |
| strain Bt407 | |
| RI Flg22 | AIALGAADDSANNIRKGSSLRD |
| SEQ ID NO: 402 | |
| Bacillus thuringiensis serovar chinensis | |
| CT-43 | |
| RI Flg22 | AIALGAADDSANNIRKGSSLRD |
| SEQ ID NO: 403 | |
| Bacillus thuringiensis serovar canadensis | |
| RI Flg22 | AIALGAADDSANNIRKGSSLRD |
| SEQ ID NO: 404 | |
| Bacillus thuringiensis serovar galleriae | |
| RI Flg22 | AIALGAADDSANNIRKGSSLRD |
| SEQ ID NO: 405 | |
| Bacillus weihenstephanensis | |
| RI Flg22 | AIALGAADDSANNIRKGSSLRD |
| SEQ ID NO: 406 | |
| Bacillus thuringiensis serovar ostriniae | |
| RI Flg22 | VIANAPNDSAHNLKKGTALHE |
| SEQ ID NO: 407 | |
| Bacillus thuringiensis | |
| RI Flg22 | AIALGAADDSANNIRKGSSLRD |
| SEQ ID NO: 408 | |
| Bacillus thuringiensis | |
| RI Flg22 | AIALGAADDSANNIRKGSSLRD |
| SEQ ID NO: 409 | |
| Bacillus thuringiensis serovar | |
| pondicheriensis | |
| RI Flg22 | VIVINAPNDASHNLKKGTALHE |
| SEQ ID NO: 410 | |
| Bacillus thuringiensis serovar Berliner | |
| RI Flg22 | AIALGAADDSANNIRKGSSLRD |
| SEQ ID NO: 411 | |
| Bacillus thuringiensis serovar Berliner | |
| RI Flg22 | VIAVANPNNSAHNLKKGTALHE |
| SEQ ID NO: 412 | |
| Bacillus cereus strain Q1 | |
| RI Flg22 | AIALGAADDSANNIRKGSSLRD |
| SEQ ID NO: 413 | |
| Bacillus cereus strain Q1 | |
| RI Flg22 | VIANAPNDSAHNLKKGTALHE |
| SEQ ID NO: 414 | |
| Bacillus thuringiensis serovar morrisoni | |
| RI Flg22 | AIALGAADDSANNIRKGSSLRD |
| SEQ ID NO: 415 | |
| Bacillus thuringiensis serovar neoleonensis | |
| RI Flg22 | AIALGAADDSANNIRKGSSLRD |
| SEQ ID NO: 416 | |
| Bacillus thuringiensis serovar morrisoni | |
| RI Flg22 | AIALGAADDSANNIRKGSSLRD |
| SEQ ID NO: 417 | |
| Bacillus thuringiensis serovar morrisoni | |
| RI Flg22 | AIALGAADDSANNIRKGSSLRD |
| SEQ ID NO: 418 | |
| Bacillus thuringiensis serovar jegathesan | |
| RI Flg22 | AIALGAADDSANNIRKGSSLRD |
| SEQ ID NO: 419 | |
| Bacillus cereus stain ATCC 10987 | |
| RI Flg22 from Flagellin A | AIALGAADDASNNIRKGSSLRD |
| SEQ ID NO: 420 | |
| Bacillus thuringiensis serovar monterrey | |
| RI Flg22 | VIANAPNDSANNLKKGTALHE |
| SEQ ID NO: 421 | |
| Bacillus cereus strain NC7401 | |
| RI Flg22 | AIALGAADDSANNIRKGSSLRD |
| SEQ ID NO: 422 | |
| Bacillus cereus strain NC7401 | |
| RI Flg22 | AIALGAADDSANNIRKGSSLRD |
| SEQ ID NO: 423 | |
| Bacillus cereus strain AH820 | |
| RI Flg22 | AIALGAADDSANNIRKGSSLRD |
| SEQ ID NO: 424 | |
| Bacillus cereus AH187 | |
| RI Flg22 | AIALGAADDSANNIRKGSSLRD |
| SEQ ID NO: 425 | |
| Bacillus cereus | |
| RI Flg22 | AIALGAADDSANNIRKGSSLRD |
| SEQ ID NO: 426 | |
| Bacillus cereus | |
| RI Flg22 | AIALGAADDSANNIRKGSSLRD |
| SEQ ID NO: 427 | |
| Bacillus thuringiensis | |
| Strain HD-771 [51] | |
| RI Flg22 | AIALGAADDANNIRKGSSLRD |
| SEQ ID NO: 428 | |
| Bacillus thuringiensis serovar sotto [52] | |
| RI Flg22 | AIALGAADDSANNIRKGSSLRD |
| SEQ ID NO: 429 | |
| Bacillus thuringiensis serovar Novosibirsk | |
| RI Flg22 | AIALGAADDSANNIRKGSSLRD |
| SEQ ID NO: 430 | |
| Bacillus thuringiensis serovar londrina | |
| RI Flg22 | VIAINAPNNSAHNLKKGTALHE |
| SEQ ID NO: 431 | |
| Bacillus cereus strain E33L | |
| RI Flg22 | AIALGAADDSANNIRKGSSLRD |
| SEQ ID NO: 432 | |
| Bacillus cereus strain E33L | |
| RI Flg22 | AIALGAADDSANNIRKGSSLRD |
| SEQ ID NO: 433 | |
| Bacillus cereus | |
| strain FRI-35 | |
| RI Flg22 | VIAINAPNDSANNLKKGTALHE |
| SEQ ID NO: 434 | |
| Bacillus cereus strain FRI-35 | |
| RI Flg22 | AIALGAADDSANNIRKGSSLRD |
| SEQ ID NO: 435 | |
| Bacillus thuringiensis | |
| RI Flg22 | AIALGAADDANNIRKGSSLRD |
| SEQ ID NO: 436 | |
| Bacillus cereus strain ATCC 4342 | |
| RI Flg22 | VIANAPNDSAHNLKKGTALHE |
| SEQ ID NO: 437 | |
| Bacillus thuringiensis | |
| RI Flg22 | AIALGAADDSANNIRKGSSLRD |
| SEQ ID NO: 438 | |
| Bacillus thuringiensis | |
| RI Flg22 | SIALGAADDSASNIRQGSSLKE |
| SEQ ID NO: 439 | |
| Bacillus aryabhattai | |
| RI Flg22 | AIALGAADDSASNIQKGSSLRN |
| SEQ ID NO: 440 | |
| Bacillus manliponensis | |
| RI Flg22 | SIALGAADDAASNIRYGSSLRL |
| SEQ ID NO: 441 | |
| Lysinibacillus sp. strain BF-4 | |
| RI Flg22 | SIALGAADDAASNIRYGSSLRL |
| SEQ ID NO: 442 | |
| Lysinibacillus sp. strain 13S34_air | |
| RI Flg22 | SIAGLAADDSAGNIRLGSSLKG |
| SEQ ID NO: 443 | |
| Paenibacillus sp. strain HW567 | |
| RI Flg22 | AIALGAADDSANNIRKGSSLRD |
| SEQ ID NO: 444 | |
| Bacillus anthracis | |
| RI Flg22 | AIALGAADDAASNIRKGSSLRN |
| SEQ ID NO: 445 | |
| Bacillus anthracis | |
| RI Flg22 | AIALGAADDAASNIRKGSSLRN |
| SEQ ID NO: 446 | |
| Bacillus anthracis | |
| RI Flg22 | AIALGAADDAASNIRKGSSLRN |
| SEQ ID NO: 447 | |
| Bacillus anthracis | |
| RI Flg22 | AIALGAADDAASNIRKGSSLRN |
| SEQ ID NO: 448 | |
| Bacillus anthracis strain H9401 | |
| RI Flg22 | SIALGAADDSASNIRQGSSLKE |
| SEQ ID NO: 449 | |
| Bacillus megaterium strain WSH-002 | |
| RI Flg22 | SIALGAADDSARNIRYGSSLRE |
| SEQ ID NO: 450 | |
| Aneurinibacillus sp. XH2 | |
| SEQ ID NO: | Peptide Flg15 |
| RI Flg15-Bt4Q7 | AIALGAADDKASNIR |
| SEQ ID NO: 586 | |
| Modified FLG15-Bt4Q7; Syn01 | |
| Bacillus thuringiensis strain 4Q7 | |
| SEQ ID NO: | Peptide FlgII-28 |
| RI FlgII-28-Bt.4Q7 | SAQNGKTNTGNASQNALDRMRLLINSVS |
| SEQ ID NO: 451 | |
| Bacillus thuringiensis | |
| strain 4Q7 | |
| RI FlgII-28 | SAQNGKTNTGNASQNALDRMRLLINSVS |
| SEQ ID NO: 452 | |
| Bacillus thuringiensis, strain | |
| HD1002 | |
| RI FlgII-28 | SAQNGKTNTGNASQNALDRMRLLINSVS |
| SEQ ID NO: 453 | |
| Bacillus thuringiensis, strain | |
| HD-789 | |
| RI FlgII-28 | SAQNGKTNTGNASQNALDRMRLLINSVS |
| SEQ ID NO: 454 | |
| Bacillus cereus | |
| strain G9842 | |
| RI FlgII-28 | SHRNKNSNTGNASQVALDRMRQLINTVT |
| SEQ ID NO: 455 | |
| Bacillus thuringiensis serovar indiana | |
| strain HD521 | |
| RI FlgII-28 | ASKNENTNTGNASQNAIDRMRLLINSVS |
| SEQ ID NO: 456 | |
| Bacillus thuringiensis strain CTC | |
| RI FlgII-28 | AKQNDDTNTGNASQNALDRMRLLINSVS |
| SEQ ID NO: 457 | |
| Bacillus thuringiensis | |
| serovaryunnanensis strain IEBC-T20001 | |
| RI FlgII-28 | AAKNEDTNTGNASQNALDRMRLLINSVS |
| SEQ ID NO: 458 | |
| Bacillus thuringiensis serovar tolworthi | |
| RI FlgII-28 | LAVQNKDTNTGNASQNAIDRMRLLINSVS |
| SEQ ID NO: 459 | |
| Bacillus cereus strain FM1 | |
| RI FlgII-28 | SDRNKNSNTGNASQVAVDRMRQLINTVT |
| SEQ ID NO: 460 | |
| Bacillus cereus strain FM1 | |
| RI FlgII-28 | AQQNDATNTGNASQNAIDRMRLLINSVS |
| SEQ ID NO: 461 | |
| Bacillus thuringiensis strain MC28 | |
| RI FlgII-28 | AAQNKDTNTGSASQNALDRMRLLINSVS |
| SEQ ID NO: 462 | |
| Bacillus bombysepticus strain Wang | |
| RI FlgII-28 | AAQNKDTNTGSASQNALDRMRLLINSVS |
| SEQ ID NO: 463 | |
| Bacillus thuringiensis serovar kenyae | |
| RI FlgII-28 | AAQNKDTNTGSASQNALDRMRLLINSVS |
| SEQ ID NO: 464 | |
| Bacillus thuringiensis serovar kenyae | |
| RI FlgII-28 | AKQNDGTNTGNASQNALDRMRLLINSVS |
| SEQ ID NO: 465 | |
| Bacillus cereus | |
| RI FlgII-28 | NLSDRNKNSNTGNASQVALDRMRQLINT |
| SEQ ID NO: 466 | |
| Bacillus cereus | |
| RI FlgII-28 | NLSDRNKNLNTGNASQVAVDRMRQLVNT |
| SEQ ID NO: 467 | |
| Bacillus thuringiensis serovar finitimus | |
| strain YBT-020 | |
| RI FlgII-28 | ASKNSDTNTGNASQNAIDRMRLLINSVS |
| SEQ ID NO: 468 | |
| Bacillus thuringiensis serovar finitimus | |
| strain YBT-020 | |
| RI FlgII-28 | AAKNEATNTGNASQNALDRMRLLINSVS |
| SEQ ID NO: 469 | |
| Bacillus cereus stain B4264 | |
| RI FlgII-28 | AKQNDSTNTGNASQNAIDRMRLLINSVS |
| SEQ ID NO: 470 | |
| Bacillus thuringiensis serovar nigeriensis | |
| RI FlgII-28 | AQQNDATNTGNASQNAIDRMRLLINSVS |
| SEQ ID NO: 471 | |
| Bacillus thuringiensis | |
| RI FlgII-28 | SDRNKNSNTGNASQVALDRMRQLINMVT |
| SEQ ID NO: 472 | |
| Bacillus thuringiensis serovar konkukian | |
| strain 97-27 | |
| RI FlgII-28 | AQQNDATNTGNASQNAIDRMRLLINSVS |
| SEQ ID NO: 473 | |
| Bacillus thuringiensis serovar konkukian | |
| strain 97-27 | |
| RI FlgII-28 | SDRNTNSNTGNASQIAFDRMHQLINTVT |
| SEQ ID NO: 474 | |
| Bacillus thuringiensis serovar thuringiensis | |
| strain IS5056 | |
| RI FlgII-28 | ASQNKDTNTGNASQNSIDRMRLLINSVS |
| SEQ ID NO: 475 | |
| Bacillus thuringiensis serovar thuringiensis | |
| strain IS5056 | |
| RI FlgII-28 | ASQNKDTNTGNASQNSIDRMRLLINSVS |
| SEQ ID NO: 476 | |
| Bacillus thuringiensis | |
| strain Bt407 | |
| RI FlgII-28 | ASQNKDTNTGNASQNSISRMRLLINSVS |
| SEQ ID NO: 477 | |
| Bacillus thuringiensis serovar chinensis | |
| CT-43 | |
| RI FlgII-28 | AAQNENTNTGNASQNALDRMRLLINSVS |
| SEQ ID NO: 478 | |
| Bacillus thuringiensis serovar canadensis | |
| RI FlgII-28 | AQQNEDTNTGNASQNSLDRMRLLINSVS |
| SEQ ID NO: 479 | |
| Bacillus thuringiensis serovar galleriae | |
| RI FlgII-28 | AQQNEDTNTGNASQNSLDRMRLLINSVS |
| SEQ ID NO: 480 | |
| Bacillus weihenstephanensis | |
| RI FlgII-28 | AKQNDGTNTGNASQNAIDRMRLLINSVS |
| SEQ ID NO: 481 | |
| Bacillus thuringiensis serovar ostriniae | |
| RI FlgII-28 | SDRNKNSNTDNSSQVALDRMRQLINAVT |
| SEQ ID NO: 482 | |
| Bacillus thuringiensis | |
| RI FlgII-28 | AKQNDDTNTGNASQNALDRMRLLINSVS |
| SEQ ID NO: 483 | |
| Bacillus thuringiensis | |
| RI FlgII-28 | AKQNDDTNTGNASQNALDRMRLLINSVS |
| SEQ ID NO: 484 | |
| Bacillus thuringiensis serovar | |
| pondicheriensis | |
| RI FlgII-28 | SDRNTNSNTGNASQIAFDRMHQLINTVT |
| SEQ ID NO: 485 | |
| Bacillus thuringiensis serovar Berliner | |
| RI FlgII-28 | ASQNKDTNTGNASQNSIDRMRLLINSVS |
| SEQ ID NO: 486 | |
| Bacillus thuringiensis serovar Berliner | |
| RI FlgII-28 | SDRNKSSNTGNASQVAVDRMRQLVNTVT |
| SEQ ID NO: 487 | |
| Bacillus cereus strain Q1 | |
| RI FlgII-28 | AVQKDTNTGNASQNAIDRMRLLINSVS |
| SEQ ID NO: 488 | |
| Bacillus cereus strain Q1 | |
| RI FlgII-28 | SDRNKNSNTSNASQIALDRMRQLINMVT |
| SEQ ID NO: 489 | |
| Bacillus thuringiensis serovar morrisoni | |
| RI FlgII-28 | AKQNDSTNIGNASQNAIDRMRLLINSVS |
| SEQ ID NO: 490 | |
| Bacillus thuringiensis serovar neoleonensis | |
| RI FlgII-28 | AKQNDGTNTFNASQNAIDRMRLLINSVS |
| SEQ ID NO: 491 | |
| Bacillus thuringiensis serovar morrisoni | |
| RI FlgII-28 | AKQNDGTNTFNASQNAIDRMRLLINSVS |
| SEQ ID NO: 492 | |
| Bacillus thuringiensis serovar morrisoni | |
| RI FlgII-28 | AAQNGNTNTFNASQNAIDRMRLLINSVS |
| SEQ ID NO: 493 | |
| Bacillus thuringiensis serovar jegathesan | |
| RI FlgII-28 | AAQNKDTNTGNASQNAIDRMRLLINSVS |
| SEQ ID NO: 494 | |
| Bacillus cereus stain ATCC 10987 | |
| RI FlgII-28 from Flagellin A | AAQNENTNTGNASQNALDRMRLLINSVS |
| SEQ ID NO: 495 | |
| Bacillus thuringiensis serovar monterrey | |
| RI FlgII-28 | SDRNKNSNTDNASQVALDRMRQLVNTVT |
| SEQ ID NO: 496 | |
| Bacillus cereus strain NC7401 | |
| RI FlgII-28 | AAKNENTNTGNASQNALDRMRLLINSVS |
| SEQ ID NO: 497 | |
| Bacillus cereus strain NC7401 | |
| RI FlgII-28 | AAQNDSTNTGNASQNALDRMRLLINSVS |
| SEQ ID NO: 498 | |
| Bacillus cereus strain AH820 | |
| RI FlgII-28 | AAKNENTNTGNASQNALDRMRLLINSVS |
| SEQ ID NO: 499 | |
| Bacillus cereus AH187 | |
| RI FlgII-28 | AAKNENTNTGNASQNALDRMRLLINSVS |
| SEQ ID NO: 500 | |
| Bacillus cereus | |
| RI FlgII-28 | AKQNDGTNTGNASQNAIDRMRLLINSVS |
| SEQ ID NO: 501 | |
| Bacillus cereus | |
| RI FlgII-28 | AAQNKSTNTESASQNALDRMRLLINSVS |
| SEQ ID NO: 502 | |
| Bacillus thuringiensis | |
| Strain HD-771 [51] | |
| RI FlgII-28 | AAQNKSTNTESASQNALDRMRLLINSVS |
| SEQ ID NO: 503 | |
| Bacillus thuringiensis serovar sotto [52] | |
| RI FlgII-28 | AKQNDGTNTGNASQNAIDRMRLLINSVS |
| SEQ ID NO: 504 | |
| Bacillus thuringiensis serovar Novosibirsk | |
| RI FlgII-28 | AAQNESTNTGNAQNALDRMRLLINSVS |
| SEQ ID NO: 505 | |
| Bacillus thuringiensis serovar londrina | |
| RI FlgII-28 | SNRNKNSNTVNASQVALDRMRQLINTVT |
| SEQ ID NO: 506 | |
| Bacillus cereus strain E33L | |
| RI FlgII-28 | AGQNKDTNTNASQNALDRMRLLINSVS |
| SEQ ID NO: 507 | |
| Bacillus cereus strain E33L | |
| RI FlgII-28 | AAQNKDTNTGNASQNALDRMRLLINSVS |
| SEQ ID NO: 508 | |
| Bacillus cereus | |
| strain FRI-35 | |
| RI FlgII-28 | SDRNKNSNTGNASQVALDRMRQLVNTVT |
| SEQ ID NO: 509 | |
| Bacillus cereus strain FRI-35 | |
| RI FlgII-28 | AEIDTDKNTGNATQNAIDRMRLLINSVS |
| SEQ ID NO: 510 | |
| Bacillus thuringiensis | |
| RI FlgII-28 | AEIDTDKNTGNATQNAIDRMRLLINSVS |
| SEQ ID NO: 511 | |
| Bacillus cereus strain ATCC 4342 | |
| RI FlgII-28 | SDRNKNSNTSNASQIALDRMRQLINMT |
| SEQ ID NO: 512 | |
| Bacillus thuringiensis | |
| RI FlgII-28 | AKQNDGTNTGNASQNAIDRMRLLINSVS |
| SEQ ID NO: 513 | |
| Bacillus thuringiensis | |
| RI FlgII-28 | ADLDETKNTGNGAQVVLERMRQLIDHTE |
| SEQ ID NO: 514 | |
| Bacillus aryabhattai | |
| RI FlgII-28 | SERDNGQNTGTAQTALDRMRLLINSVS |
| SEQ ID NO: 515 | |
| Bacillus manliponensis | |
| RI FlgII-28 | KARDDDTNTDTAAQVALERMRQVIAHTE |
| SEQ ID NO: 516 | |
| Lysinibacillus sp. strain BF-4 | |
| RI FlgII-28 | KARDDDTNTDTAAQVALERMRQVIAHTE |
| SEQ ID NO: 517 | |
| Lysinibacillus sp. strain 13S34_air | |
| RI FlgII-28 | NLRDSGSYTGNSAQVALENMRQLMSHIE |
| SEQ ID NO: 518 | |
| Paenibacillus sp. strain HW567 | |
| RI FlgII-28 | ADQNEKTNTGNASQNALDRMRLLINSVS |
| SEQ ID NO: 519 | |
| Bacillus anthracis | |
| RI FlgII-28 | ASQNEATNTGNSSQVAIDRMRTLINSVS |
| SEQ ID NO: 520 | |
| Bacillus anthracis | |
| RI FlgII-28 | ASQNEATNTGNSSQVAIDRMRTLINSVS |
| SEQ ID NO: 521 | |
| Bacillus anthracis | |
| RI FlgII-28 | ASQNEATNTGNSSQVAIDRMRTLINSVS |
| SEQ ID NO: 522 | |
| Bacillus anthracis | |
| RI FlgII-28 | ASQNEATNTGNSSQVIADRMRTLINSVS |
| SEQ ID NO: 523 | |
| Bacillus anthracis strain H9401 | |
| RI FlgII-28 | ADLDETKNTGNGAQVVLERMRQLIDHTE |
| SEQ ID NO: 524 | |
| Bacillus megaterium strain WSH-002 | |
| RI FlgII-28 | AKKDKSYTGNAAQVALERMRQLMEHIE |
| SEQ ID NO: 525 | |
| Aneurinibacillus sp. XH2 | |

[0173] Flg Sequences from Various Organisms

TABLE 5
Flagellin-associated Flg22 and Flg15 polypeptides and RI-polypeptides thereof
from other organisms

| SEQ ID NO: | Peptide - Amino Acid |
|---|---|
| Flagellin (Flg22) | ERLSSGLRINSAKDDAAGQAIA |
| SEQ ID NO: 526 | |
| Escherichia coli | |
| Flagellin (Retro-Inverso Flg22) | AIAQGAADDKASNIRLGSSLRE |
| SEQ ID NO: 527 | |
| Escherichia coli | |
| Flagellin (Flg15) | RINSAKDDAAGQAIA |
| SEQ ID NO: 528 | |
| Escherichia coli | |
| Flagellin (Retro-Inverso Flg15) | AIAQGAADDKASNIR |
| SEQ ID NO: 529 | |
| Escherichia coli | |
| Flagellin (Flg22) | QRLSTGSRINSAKDDAAGLQIA |
| SEQ ID NO: 530 | |
| Pseudomonas aeruginosa | |
| Flagellin (Retro Inverso Flg22) | AIQLGAADDKASNIRSGTSLRQ |
| SEQ ID NO: 531 | |
| Pseudomonas aeruginosa | |
| Flagellin (Flg22) | QRLSSGLRINSAKDDAAGLAIS |
| SEQ ID NO: 532 | |
| Xanthomonas spp. | |
| X. campestris & X. citri | |
| Flagellin (Retro Inverso Flg22) | SIALGAADDKASNIRLGSSLRQ |
| SEQ ID NO: 533 | |
| Xanthomonas spp. | |
| X. campestris & X. citri | |
| Flagellin (Flg22) | QRLSSGLRINSAKDDAAGQAIS |
| SEQ ID NO: 534 | |
| Erwinia amylovora | |
| Flagellin (Retro Inverso Flg22) | SIAQGAADDKASNIRLGSSLRQ |
| SEQ ID NO: 535 | |
| Erwinia amylovora | |
| Flagellin (Flg22) | TRLSSGKRINSAADDAAGLAIS |
| SEQ ID NO: 536 | |
| Burkholderia phytofirmans | |
| Flagellin (Retro Inverso Flg22) | SIALGAADDAASNIRKGSSLRT |
| SEQ ID NO: 537 | |
| Burkholderia phytofirmans | |
| Flagellin (Flg22) | NRLSSGKRINTAADDAAGLAIS |
| SEQ ID NO: 538 | |
| Burkholderia ubonensis | |
| Flagellin (Retro Inverso Flg22) | SIALGAADDAATNIRKGSSLRN |
| SEQ ID NO: 539 | |
| Burkholderia ubonensis | |
| Flagellin (Flg22) | TRLSSGLKINSAKDDAAGLQIA |
| SEQ ID NO: 540 | |
| Pseudomonas syringae | |
| Flagellin (Retro Inverso Flg22) | AIQLGAADDKASNIKLGSSLRT |
| SEQ ID NO: 541 | |
| Pseudomonas syringae | |
| Flagellin (FlgII-28) | ESTNILQRMRELAVQSRNDSNSATDREA |
| (SEQ ID NO: 587) | |
| Pseudomonas syringae | |
| Flagellin (Retro Inverso FlgII-28) | AERDTASNSDNRSQVALERMRQLINTSE |
| (SEQ ID NO: 588) | |
| Pseudomonas syringae | |

[0174] The composition can comprise at least one retro-inverso flagellin or flagellin associated polypeptide.

[0175] The retro-inverso flagellin or flagellin associated polypeptide can be a retro inverso Flg22 polypeptide. An amino acid sequence of the retro-inverso Flg22 polypeptide can comprise any one of SEQ ID NOs: 376-450, 527, 531, 533, 535, 537 and 539.

[0176] The retro-inverso flagellin or flagellin associated polypeptide can be a retro inverso FlgII-28 polypeptide. An amino acid sequence of the retro-inverso FlgII-28 polypeptide can comprise any one of SEQ ID NOs: 451-525, or 588.

[0177] The retro-inverso flagellin or flagellin associated polypeptide can be a retro inverso Flg15 polypeptide. An amino acid sequence of the retro-inverso Flg15 polypeptide can comprise any one of SEQ ID NOs: 529 or 586.

Sequences that Assist in Directing Flagellins or Flagellin-Associated Polypeptides to the Plant

[0178] The signature, signal anchor sorting and secretion sequences can be used separately or together in combination with any of the flagellin or flagellin-associated polypeptides as described herein. These assistance sequences are useful for the efficient delivery of the flagellin polypeptides to the plant cell membrane surface. Other assistance sequences can also assist with the translocation of the Flg polypeptide fragment across the plasma membrane. Delivery of flagellins and flagellin-associated polypeptides to the plasma membrane surface of a plant (or plant part) can contribute to downstream signalling processes and result in beneficial outcomes to a plant or a plant part, such as enhanced plant health and productivity.

[0179] The polypeptide in the compositions or methods herein can further comprise an assistance polypeptide.

[0180] The assistance polypeptide can comprise a signature polypeptide, and an amino acid sequence of the signature polypeptide can comprise any one of SEQ ID NOs: 542-548, listed in Table 6, or any combination thereof. For example, the amino acid sequence of the signature polypeptide can comprise SEQ ID NO: 542.

[0181] The assistance polypeptide can comprise a signal anchor sorting polypeptide, and an amino acid sequence of the signal anchor sorting polypeptide can comprise any one of SEQ ID NOs: 549-562, listed in Table 7, or any combination thereof. For example, the amino acid sequence of the signal anchor sorting polypeptide can comprise SEQ ID NO: 549.

[0182] The flagellin or flagellin-associated polypeptide can be produced recombinantly by a microorganism. For example, the microorganism can comprise a Bacillus, a Pseudomonas, a Paenibacillus, Aneurinibacillus or a Lysinibacillus.

[0183] The assistance polypeptide can comprise a secretion polypeptide, and an amino acid sequence of the secretion polypeptide can comprise any one of SEQ ID NOs: 563-570, or any combination thereof. For example, the amino acid sequence of the secretion polypeptide can comprise SEQ ID NO: 563.

[0184] These three types of assistance sequences are further described in Table 6 (N-terminal signature sequences), Table 7 (signal anchor sorting sequences) and Table 8 (secretion sequences).

[0185] Also provided are “assistance” sequences having conserved signature (Table 6; SEQ ID NOs: 542-548), signal anchor sorting (Table 7; SEQ ID NOs: 549-562) and secretion (Table 8; SEQ ID NOs: 563-570) sequences in combination with any of the flagellin-associated polypeptides as described herein. Particularly useful are combinations of the signature, signal anchor sorting and secretion assistance sequences with the native L-Flg polypeptides (Table 3. SEQ ID NOs: 226-375) or any of the retro inverso Flg22 polypeptides (Table 4. SEQ ID NOs: 376-525) for providing efficient delivery of the Flg polypeptides to the extracellular plant membrane surface, such as the surface of a plant or plant part.

[0186] N-terminal Signature Sequences

[0187] Amino acid “signature” sequences conserved within Bacillus, Lysinibacillus, Paenibacillus or Aneurinibacillus bacteria (genera) and other Eubacterial generas can function in targeting flagellin polypeptides to the appropriate Flg-associated receptor protein(s), such as FLS receptors that have an exposed binding site at the plant cell membrane surface and can be used to enhance Flg polypeptide-receptor binding leading to an increased activation potential of the Flg-associated receptor(s). Flagellin signature sequences as identified in Table 6 are useful for targeting and stably delivering the Flg polypeptides for binding to the FLS or FLS-like receptor(s) therefore increasing the contact and binding between the membrane receptor and the Flg polypeptide.

[0188] Conserved N-terminal signature sequences (SEQ ID NO: 542-548) can be used in combination with any of the flagellin-associated polypeptides as described herein. Of particular utility are the signature sequences used in combination with the native L-Flg polypeptides (L-Flg22 SEQ ID NOs: 226-300; L-FlgII-28 SEQ ID NOs: 301-375) or any of the retro inverso D-Flg polypeptides (D-Flg22 SEQ ID NOs: 376-450; FlgII-28 SEQ ID NO: 451-525) or any of the other Flg-associated sequences provided in Table 5 (SEQ ID NOs: 526-541) to provide efficient delivery of the Flg-associated polypeptides to the plant membrane surface.

[0189] Signature sequences assist with Flg22 and FlgII-28 bioactive priming polypeptide sequences in binding to the appropriate Flg-associated receptor(s) in order to activate the receptor(s) making it functionally active.

TABLE 6
Flagellin-associated N-terminal signature
sequences

| | Flagellin Signature |
|---|---|
| SEQ ID NO: | Sequences |
| SEQ ID NO: 542 | GFLN |
| SEQ ID NO: 543 | WGFLI |
| SEQ ID NO: 544 | MGVLN |
| SEQ ID NO: 545 | GVLN |
| SEQ ID NO: 546 | WGFFY |
| SEQ ID NO: 547 | LVPFAVWLA |
| SEQ ID NO: 548 | AVWLA |

[0190] N-terminal Signal Anchor Sorting Sequences

[0191] Amino acid “signal anchor sorting” sequences conserved within Bacillus, Lysinibacillus, Aneurinibacillus and Paenibacillus genera and other Eubacterial generas' bacteria can function in anchoring and localizing the flagellin-associate polypeptides to the plant cell membrane surface and assist in high affinity binding to the appropriate Flg-associated receptor(s) thereby increasing the activation potential of the bound receptor(s).

[0192] Conserved signal anchor sequences (SEQ ID NO: 549-562; Table 7) are located downstream of the pre-cleaved or full-length coding or partial coding flagellin sequences, for example, as described herein (SEQ ID NOs: 1-75; Table 1).

[0193] The signal anchor sorting domains as described herein are useful in membrane attachment. They can be used to aid in the localization and binding of Flg-associated polypeptides to a surface membrane receptor and have some functional similarity at the amino acid level to proteins that are endosomal (vesicular) trafficked or destined for targeting to the secretory pathway. Such signal anchor sorting sequences as described herein that are useful for anchoring the Flg bioactive priming polypeptides to the plant cell membrane are also used to enhance the membrane integration of the bioactive priming Flg polypeptides into the plant cell.

[0194] Such sequences as described in Table 7 may further be functionally annotated as import receptor signal anchor sequences, which can be used to improve targeting or delivery and efficient membrane anchoring of Flg-associated polypeptides to a plant and assist with membrane integration into the cytosol of the plant cell.

[0195] Combining the signal anchor sequences (SEQ ID NOs: 549-562; Table 7) with any of the flagellins or flagellin-associated bioactive priming polypeptides as described herein is useful to facilitate the attachment and import of these flagellin-associated polypeptide(s) into the plant.

[0196] Such signal anchor sorting sequences can be used in combination with the Flg-associated polypeptides, and are useful for targeting, efficient membrane anchoring, membrane integration and Golgi-to-lysosomal/vacuolar trafficking. The signal anchor sorting sequences are used to stably deliver the Flg polypeptides to the plant membrane surface and integrally incorporate them into the plant.

[0197] Such sequences as described herein contain di-leucine amino acids that are referenced to confer endocytosis functionalities in plant systems (Pond et al. 1995, “A role for acidic residues in di-leucine motif-based targeting to the endocytic pathway”, Journal of Biological Chemistry 270: 19989-19997, 1995).

[0198] Such signal anchor sorting sequences as described can also be used to efficiently deliver systemic signals to infection sites and stimulate a plant's innate immunity in plant cells.

TABLE 7
Flagellin-associated signal anchor sorting
sequences

| | Signal Anchor |
|---|---|
| SEQ ID NO: | Sequence |
| SEQ ID NO: 549 | LLGTADKKIKIQ |
| SEQ ID NO: 550 | LLKSTQEIKIQ |
| SEQ ID NO: 551 | LLNEDSEVKIQ |
| SEQ ID NO: 552 | LGVAANNTQ |
| SEQ ID NO: 553 | LLRMRDLANQ |
| SEQ ID NO: 554 | LQRMRDVAVQ |
| SEQ ID NO: 555 | LLRMRDISNQ |
| SEQ ID NO: 556 | LLRMRDIANQ |
| SEQ ID NO: 557 | LQKQIDYIAGNTQ |
| SEQ ID NO: 558 | LLIRLPLD |
| SEQ ID NO: 559 | QRMRELAVQ |
| SEQ ID NO: 560 | TRMRDIAVQ |
| SEQ ID NO: 561 | TRMRDIAVQ |
| SEQ ID NO: 562 | QRMRELVVQ |

[0199] C-Terminal Secretion Sequences

[0200] Conserved sequences located in the C-terminus of flagellin(s) are further described as secretion sequences (SEQ ID NO: 563-570; Table 8).

[0201] Conserved sequences were identified in the C-terminus of the Bacillus, Lysinibacillus, and Paenibacillus bacteria (genera) and other Eubacterial genera derived flagellin proteins and comprise 6 amino acids, for example LGATLN, LGSMIN, or LGAMIN. These sequences were functionally annotated using BLAST against the bacterial databases as motifs that have highest homology to secretion polypeptides. The 6 amino acid conserved polypeptides identified were found most similar to those found in type III secretion systems in E. coli. Type III export systems have been cited to be involved in the translocation of polypeptides across the plant cell membrane. The filament assembly of flagellin is dependent on the availability of flagellins to be secreted and may require chaperones that assist in the secretory process.

[0202] These secretion polypeptides as described herein can be used in combination with any of the flagellin-associated polypeptides as described herein to deliver these polypeptides/peptides into the cytosol of the host plant thus providing beneficial outcomes to a plant.

TABLE 8
C-terminal flagellin-associated secretion
sequences

| | Flagellin Secretion |
|---|---|
| SEQ ID NO: | polypeptides |
| SEQ ID NO: 563 | LGATLN |
| SEQ ID NO: 564 | LGATQN |
| SEQ ID NO: 565 | LAQANQ |
| SEQ ID NO: 566 | LGAMIN |
| SEQ ID NO: 567 | LGSMIN |
| SEQ ID NO: 568 | MGAYQN |
| SEQ ID NO: 569 | LGAYQN |
| SEQ ID NO: 570 | YGSQLN |

[0203] The signature (SEQ ID NO: 542-548; Table 6), signal anchor sorting (SEQ ID NO: 549-562; Table 7) and secretion (SEQ ID NO: 563-570; Table 8) sequences as provided herein can be used with any of the flagellin polypeptides or the flagellin-associated polypeptides to promote growth and provide health and protective benefits to a plant or a plant part.

[0204] Modification of Flg polypeptide Sequences Function

[0205] Any of the L or D Flg-associated sequences provided in Tables 3, 4 or 5 can be similarly modified as fused to any of the assistance sequences as described in Table 6-8. For one example, fusion of any of these assistance sequences will present a modification to the Bt.4Q7Flg22 bioactive priming polypeptide sequence identified as SEQ ID NO: 226.

[0206] Mutations to Flg-Associated Polypeptides to Increase Responsiveness to Reactive Oxygen Species or Polypeptide Stability

[0207] The flagellin or flagellin associated polypeptide useful in the compositions and methods herein can comprise a mutant flagellin or flagellin-associated polypeptide.

[0208] The mutant flagellin or flagellin-associated polypeptide can be derived from a Bacillus, a Lysinibacillus, a Paenibacillus, or an Aneurinibacillus genus bacterium. Other polypeptides from other Eubacterial classes, including Enterobacteraciae, can also be used in the same fashion. Other generas of interest include Pseudomonas, Escherichia, Xanthomonas, Burkholderia, Erwinia, and others.

[0209] The amino acid sequence of the flagellin or flagellin-associated polypeptide can comprise any one of SEQ ID NOs: 226, 289, 290, 291, 293, 294, 295, 300, 437, 526, 532, 534, 536, 538, 540, 571-585 and 587-603. For example, the amino acid sequence of the flagellin or flagellin-associated polypeptide can comprise any one of SEQ ID NOs: 226, 293, 295, 300, 540, 571-579, and 589-590, or any combination thereof. For example, the amino acid sequence of the flagellin or flagellin-associated polypeptide can comprise SEQ ID NO: 226, 571, 590 or any combination thereof. The amino acid sequence of the flagellin or flagellin-associated polypeptide can comprise SEQ ID NO: 226. The amino acid sequence of the flagellin or flagellin-associated polypeptide used in the compositions and methods herein can comprise SEQ ID NO: 590. The amino acid sequence of the flagellin or flagellin-associated polypeptide used in the compositions and methods herein can comprise SEQ ID NO: 571. The amino acid sequence of the flagellin or flagellin-associated polypeptide can comprise any one of SEQ ID NOs: 591-603.

[0210] The flagellin or flagellin-associated polypeptide can be modified chemically on its N or C terminus. Common modification of the N and C-termini include: acetylation, lipid addition, urea addition, pyroglutamyl addition, carbamate addition, sulfonamide addition, alkylamide addition, biotinylation, phosphorylation, glycosylation, PEGylation, methylation, biotinylation, acid addition, amide addition, ester addition, aldehyde addition, hydrazide addition, hydroxyamic acid addition, chloromethyl ketone addition, or addition of purification tags. These tags can increase activity of the polypeptides, increase stability, add protease inhibitor abilities to the polypeptides, block proteases directly, allow for tracking, and help in binding to plant tissues.

[0211] The flagellin or flagellin-associated polypeptide can be modified via crosslinking or cyclization. Crosslinking can bind polypeptides either to each other or to a secondary surface or moiety to help in delivery or stability of the polypeptides. Cyclization can be performed, for example, to both increase activity of the polypeptide as well as prevent protease interaction with the polypeptide.

[0212] Sequence modifications or mutations can be made to any amino acid sequence(s) as described in Tables 4 and 5 and replaced with any of the 20 standard amino acid sequences known in nature or replaced with a nonstandard or non-canonical amino acid sequence, such as selenocysteine, pyrrolysine, N-formylmethione, etc. For example, modifications or mutations can be made to the internal sequences as shown in SEQ ID NO: 571, to the C-terminis as shown in SEQ ID NO: 572 or SEQ ID NO: 589, or to the N terminus as shown in SEQ ID NO: 573 to produce Flg polypeptides with enhanced ROS activates and increased functionality in a plant or plant part. Modified polypeptides also can be truncated at the N or C terminus as shown in SEQ ID NO: 590 (N-terminus truncation) to further increase functionality in a plant or plant part. Table 9 summarizes flagellin polypeptides identified that provide modified ROS activity.

TABLE 9
Flagellin polypeptides Flg22 identified from Bacillus or other bacteria with
mutations that provide modified ROS activity

| SEQ ID NO: | Peptide Flg22 |
|---|---|
| Flg22-Bt4Q7 | DRLSSGKRINSAKDDAAGLAIA |
| SEQ ID NO:- 571 | |
| Bacillus thuringiensis | |
| strain 4Q7 | |
| Modified FLG22-Bt4Q7 (S13K); | |
| Syn01 | |
| Flg22-Bt4Q7 | DRLSSGKRINSASDDAAGLQIA |
| SEQ ID NO: 572 | |
| Bacillus thuringiensis | |
| strain 4Q7 | |
| Modified FLG22-Bt4Q7 (A20Q); | |
| Syn02 | |
| Flg22-Bt4Q7 | QRLSSGKRINSASDDAAGLAIA |
| SEQ ID NO: 573 | |
| Bacillus thuringiensis | |
| strain 4Q7 | |
| Modified FLG22-Bt4Q7 (D1Q); | |
| Syn03 | |
| Flg22-Bt4Q7 | NRLSSGKRINSASDDAAGLAIA |
| SEQ ID NO: 574 | |
| Bacillus thuringiensis | |
| strain 4Q7 | |
| Modified FLG22-Bt4Q7 (D1N); | |
| Syn06 | |
| Caballeronia megalochromosomata | TRLSSGKRINSASDDAAGLAIA |
| SEQ ID NO: 575 | |
| Flg22-Bt4Q7 | DRLSSGYRINSASDDAAGLAIA |
| SEQ ID NO: 576 | |
| Bacillus thuringiensis | |
| strain 4Q7 | |
| Modified FLG22-Bt4Q7 (K7Y); | |
| Syn07 | |
| Flg22-Bt4Q7 | DRLSSGFRINSASDDAAGLAIA |
| SEQ ID NO: 577 | |
| Bacillus thuringiensis | |
| strain 4Q7 | |
| Modified FLG22-Bt4Q7 (K7F); Syn08 | |
| Flg22-Bt4Q7 | DRLSSGKRINSASDDPAGLAIA |
| SEQ ID NO: 578 | |
| Bacillus thuringiensis | |
| Modified FLG22-Bt4Q7 (A16P); | |
| Syn05 | |
| Flg22-Bt4Q7 | DRLSSGQRINSASDDAAGLAIA |
| SEQ ID NO: 579 | |
| Bacillus thuringiensis | |
| strain 4Q7 | |
| Modified FLG22-Bt4Q (K7Q); | |
| Syn09 | |
| Flg22-Bt4Q7 | DRLSSGKRINSASDPAAGLAIA |
| SEQ ID NO: 589 | |
| Bacillus thuringiensis | |
| strain 4Q7 | |
| Modified FLG22-Bt4Q7 (D15P); | |
| Syn04 | |
| Flg15-Bt4Q7 | RINSAKDDAAGLAIA |
| SEQ ID NO: 590 | |
| Bacillus thuringiensis | |
| N-term Truncated Syn01 | |
| Bm.Flg22-B1 | NRLSSGKQINSASDDAAGLAIA |
| Bacillus manliponensis | |
| SEQ ID NO: 290 | |
| Ba.Flg22-B2 | NRLSSGKRINSAADDAAGLAIA |
| Bacillus anthracis | |
| SEQ ID NO: 295 | |
| Bc.Flg22-B3 | DRLSSGKRINNASDDAAGLAIA |
| Bacillus cereus | |
| SEQ ID NO: 294 | |
| A. spp.Flg22-B4 | ERLSSGYRINRASDDAAGLAIS |
| Aneurinibacillus spp. XH2 | |
| SEQ ID NO: 300 | |
| Ba.Flg22-B5 | EKLSSGQRINSASDDAAGLAIS |
| Bacillus aryabhattai | |
| SEQ ID NO: 289 | |
| P spp.Flg22-B6 | GKLSSGLRINGASDDAAGLAIS |
| Paenibacillus spp. strain HW567 | |
| SEQ ID NO: 293 | |
| L spp.Flg22-L1 | LRLSSGYRINSAADDAAGLAIS |
| Lysinibacillus spp. | |
| SEQ ID NO: 291 | |
| L spp.Flg22-L2 | EKLSSGLRINRAGDDAAGLAIS |
| Lysinibacillus spp. | |
| SEQ ID NO: 580 | |
| L spp.Flg22-L3 | EKLSSGYKINRASDDAAGLAIS |
| Lysinibacillus spp. | |
| SEQ ID NO: - 581 | |
| L spp.Flg22-L4 | LRISSGYRINSAADDPAGLAIS |
| Lysinibacillus spp. SG9 | |
| SEQ ID NO: 582 | |
| Lf.Flg22-L5 | LRISTGYRINSAADDPAGLAIS |
| Lysinibacillus fusiformis | |
| SEQ ID NO: 583 | |
| Lm.Flg22-L6 | EKLSSGFRINRAGDDAAGLAIS |
| Lysinibacillus macroides | |
| SEQ ID NO: 584 | |
| Lx.Flg22-L6 | EKLSSGYKINRAGDDAAGLAIS |
| Lysinibacillus | |
| xylanilyticus | |
| SEQ ID NO: 585 | |
| Pa.Flg22 | QRLSTGSRINSAKDDAAGLQIA |
| Pseudomonas aeruginosa | |
| SEQ ID NO: 530 | |
| Ec.Flg22 | ERLSSGLRINSAKDDAAGQAIA |
| Escherichia coli | |
| SEQ ID NO: 526 | |
| Xcc.Flg22 | QRLSSGLRINSAKDDAAGLAIS |
| Xanthomonas campestris pv | |
| campestris strain 305 or | |
| (Xanthomonas citri pv. citri) | |
| SEQ ID NO: 532 | |
| Ea.Flg22 | QRLSSGLRINSAKDDAAGQAIS |
| Erwinia amylovora | |
| SEQ ID NO: 534 | |
| Bp.Flg22 | TRLSSGKRINSAADDAAGLAIS |
| Burkholderia phytofirmans strain | |
| Ps.IN | |
| SEQ ID NO: 536 | |
| Bu.Flg22 | NRLSSGKRINTAADDAAGLAIS |
| Burkholderia ubonensis | |
| SEQ ID NO: 538 | |
| Ps.Flg22 | TRLSSGLKINSAKDDAAGLQIA |
| Pseudomonas syringae pv. actinidiae | |
| ICMP 19096 | |
| SEQ ID NO: 540 | |

### Core Active Domain of Flg22

[0213] The underlined portions of the sequences in Table 9 represent the core active domain of Flg22. This core domain comprises, for example, SEQ ID NO: 591 with up to one, two or three amino acid substitutions (represented by SEQ ID NOs 592-603) that can promote growth, disease reduction and/or prevention in crops, horticultural, and ornamental plants. For ease of reference, this core domain is represented as the consensus sequence having the SEQ ID NO: 603. The various native and mutant Flg22 polypeptides comprising SEQ ID NOs 591-603 are described along with the consensus sequence in Table 10, below. Therefore, the polypeptides used in the compositions and methods herein can further comprise a core sequence. The core sequence can comprise any one of SEQ ID NOs 591-603.

[0214] The polypeptide used in any of the compositions or methods herein can also comprise any polypeptide comprising any one of SEQ ID NOs 1-590, 604-778 and 794-796 wherein the polypeptide further comprises the core sequence comprising any one of SEQ ID NOs: 591-603. The inclusion of the core sequence in the polypeptide or full-length protein of dissimilar function can increase the bioactive priming activity of the polypeptide, and any composition comprising the polypeptide.

TABLE 10
Flg22 core sequence with variants

| | | Polypeptides comprising |
|---|---|---|
| SEQ ID NO: | FLG22 core sequence | core sequence |
| SEQ ID NO: 591 | RINSASDD | SEQ ID NO: 226-229 |
| | | SEQ ID NO: 289 |
| | | SEQ ID NO: 299 |
| | | SEQ ID NO: 536 |
| | | SEQ ID NO: 572-579 |
| SEQ ID NO: 592 | RINNASDD | SEQ ID NO: 231-234 |
| | | SEQ ID NO: 236-240 |
| | | SEQ ID NO: 243-246 |
| | | SEQ ID NO: 248 |
| | | SEQ ID NO: 250-256 |
| | | SEQ ID NO: 258-259 |
| | | SEQ ID NO: 261 |
| | | SEQ ID NO: 263 |
| | | SEQ ID NO: 265-270 |
| | | SEQ ID NO: 272-280 |
| | | SEQ ID NO: 282-283 |
| | | SEQ ID NO: 285-286 |
| | | SEQ ID NO: 288 |
| | | SEQ ID NO: 294 |
| SEQ ID NO: 593 | QINSASDD | SEQ ID NO: 290 |
| SEQ ID NO: 594 | RINSAADD | SEQ ID NO: 291-292 |
| | | SEQ ID NO: 295-298 |
| | | SEQ ID NO: 582-583 |
| | | SEQ ID NO: 536 |
| | | SEQ ID NO: 582-583 |
| SEQ ID NO: 595 | RINGASDD | SEQ ID NO: 293 |
| SEQ ID NO: 596 | RINRASDD | SEQ ID NO: 300 |
| SEQ ID NO: 597 | RINSAKDD | SEQ ID NO: 526 |
| | | SEQ ID NO: 528 |
| | | SEQ ID NO: 530 |
| | | SEQ ID NO: 532 |
| | | SEQ ID NO: 534 |
| | | SEQ ID NO: 571 |
| | | SEQ ID NO: 586 |
| SEQ ID NO: 598 | RINTAADD | SEQ ID NO: 538 |
| SEQ ID NO: 599 | KINSAKDD | SEQ ID NO: 540 |
| SEQ ID NO: 600 | RINRAGDD | SEQ ID NO: 580 |
| | | SEQ ID NO: 584 |
| SEQ ID NO: 601 | KINRASDD | SEQ ID NO: 581 |
| SEQ ID NO: 602 | KINRAGDD | SEQ ID NO: 585 |
| SEQ ID NO: 603 | (R/Q/K)IN(S/N/G/R/T)A(S/A/K/G)DD | Consensus of SEQ ID NO: |
| | | 591-602 (sequences |
| | | identified in this Table) |

[0215] Root Hair Promoting Polypeptide (RHPP)

[0216] The composition can comprise at least one RHPP.

[0217] The amino acid sequence of the RHPP can comprise any one of SEQ ID NO: 604, 607, 608, and 745-755. For example, the amino acid sequence of the RHPP can comprise SEQ ID NO: 604.

[0218] A combination of the polypeptide comprising an RHPP and a polypeptide comprising a flagellin or flagellin associated polypeptide is also provided. The flagellin or flagellin associated polypeptide can comprise any one of SEQ ID NO: 226, 590, and 571. In some instances, the composition comprises an RHPP comprising SEQ ID NO: 604 and a flagellin comprising SEQ ID NO: 226. In other instances, the composition comprises an RHPP comprising SEQ ID NO: 604 and a flagellin comprising SEQ ID NO: 571.

[0219] Additional RHPP bioactive priming polypeptides can be derived from the full length Kunitz Trypsin Inhibitor protein from Glycine max comprising SEQ ID NO: 606 or can be obtained from additional species (Table 12). The RHPP polypeptide can be modified via C-terminal amidation, N-terminal acetylation or other modification. The RHPP bioactive priming polypeptide can be obtained through addition of crude protease digest of kunitz trypsin inhibitor and/or soybean meal.

[0220] RHPP can be provided, for example, as a foliar application to produce beneficial phenotypes in corn, soybean and other vegetables or in citrus plants. For example, foliar application of RHPP can increase row crop and vegetable yield and/or improve disease symptoms and/or improve juice quality and crop yield in citrus plants.

TABLE 11
Amino acid sequence for RHPP forward and retro-inverso sequences

| SEQ ID NO: | Peptide Sequence Amino Acid |
|---|---|
| Root Hair Promoting Peptide | GGIRAAPTGNER |
| (RHPP) | |
| SEQ ID NO: 604 | |
| Glycine max | |
| MW 1198.20 Da | |
| Root Hair Promoting Peptide | RENGTPAARIGG |
| (Retro Inverso RHPP) | |
| SEQ ID NO:605 | |
| Glycine max | |
| MW 1198.20 Da | |
| KunItz Trypsin Inhibitor | MKSTIFFALFLFCAFTTSYLPSAIADFVLDNEGNPLENGG |
| SEQ ID NO: 606 | TYYILSDITAFGGIRAAPTGNERCPLTVVQSRNELDKGIET |
| Glycine Max | IISSPYRIRFIAEGHPLSLKFDSFAVIMLCVGIPTEWSVVED |
| | LPEGPAVKIGENKDAMDGWFRLERVSDDEFNNYKLVFC |
| | PQQAEDDKCGDIGISIDHDDGTRRLVVSKNKPLVVQFQK |
| | LDKESLAKKNHGLSRSE |

TABLE 12
Homologs and Variants of RHPP

| SEQ ID NO: | Peptide Sequence Amino Acid |
|---|---|
| Homolog RHPP | GGIRATPTENER |
| SEQ ID NO: 607 | |
| Glycine max | |
| Homolog RHPP | GGIRVAATGKER |
| SEQ ID NO: 608 | |
| Glycine max Glycine soja | |
| Root Hair Promoting Peptide (RHPP)-Pp | GGIRAAPT |
| SEQ ID NO: 745 | |
| Physcomitrella patens | |
| Root Hair Promoting Peptide (RHPP)-Mc | GIRDAPAGNE |
| SEQ ID NO: 746 | |
| Macleaya cordata | |
| Root Hair Promoting Peptide (RHPP)-Bd | GGARAAPAGEER |
| SEQ ID NO: 747 | |
| Brachypodium distachyon | |
| Root Hair Promoting Peptide (RHPP)-Va | GGIRTAITGNE |
| SEQ ID NO: 748 | |
| Vigna angularis | |
| Root Hair Promoting Peptide (RHPP)-Ls | GGISASPTGN |
| SEQ ID NO: 749 | |
| Lactuca sativa | |
| Root Hair Promoting Peptide (RHPP)-Vr | GGIRRARTGNE |
| SEQ ID NO: 750 | |
| Vigna radiata | |
| Syn01 Root Hair Promoting Peptide (RHPP) | GGIRRAPTGNER |
| SEQ ID NO: 751 | |
| Syn02 Root Hair Promoting Peptide (RHPP) | GGIRDAPTGNER |
| SEQ ID NO: 752 | |
| Syn03 Root Hair Promoting Peptide (RHPP) | GGIRAARTGNER |
| SEQ ID NO: 753 | |
| Syn04 Root Hair Promoting Peptide (RHPP) | GGIRAAPTGKER |
| SEQ ID NO: 754 | |
| Syn05 Root Hair Promoting Peptide (RHPP) | GGIRASPTGNER |
| SEQ ID NO: 755 | |

[0221] The polypeptide can comprise at least one retro inverso (RI) RHPP.

[0222] The retro inverso RHPP can have any amino acid sequence that comprises any one of SEQ ID NOs: 605, 609, 610 or 756-766 (Table 13).

[0223] The retro inverso (RI) RHPP can be modified via C-terminal amidation or N-terminal acetylation.

TABLE 13
Retro inverso amino acid sequences for homologs and variants of RHPP.

| SEQ ID NO: | Peptide Sequence Amino Acid |
|---|---|
| Retro-Inverso Homolog RHPP | RENETPTARIGG |
| SEQ ID NO: 609 | |
| Glycine max | |
| Retro-Inverso Homolog RHPP | REKGTAAVRIGG |
| SEQ ID NO: 610 | |
| Glycine max Glycine soja | |
| Retro-Inverso Root Hair Promoting Peptide | TPAARIGG |
| (RHPP)-Pp | |
| SEQ ID NO: 756 | |
| Physcomitrella patens | |
| Retro-Inverso Root Hair Promoting Peptide | ENGAPADRIG |
| (RHPP)-Mc | |
| SEQ ID NO: 757 | |
| Macleaya cordata | |
| Retro-Inverso Root Hair Promoting Peptide | REEGAPAARAGG |
| (RHPP)-Bd | |
| SEQ ID NO: 758 | |
| Brachypodium distachyon | |
| Retro-Inverso Root Hair Promoting Peptide | ENGTIATRIGG |
| (RHPP)-Va | |
| SEQ ID NO: 759 | |
| Vigna angularis | |
| Retro-Inverso Root Hair Promoting Peptide | NGTPSASIGG |
| (RHPP)-Ls | |
| SEQ ID NO: 760 | |
| Lactuca sativa | |
| Retro-Inverso Root Hair Promoting Peptide | ENGTRARRIGG |
| (RHPP)-Vr | |
| SEQ ID NO: 761 | |
| Vigna radiate | |
| Retro-Inverso Syn01 Root Hair Promoting | RENGTPARRIGG |
| Peptide (RHPP) | |
| SEQ ID NO: 762 | |
| Retro-Inverso Syn02 Root Hair Promoting | RENGTPADRIGG |
| Peptide (RHPP) | |
| SEQ ID NO: 763 | |
| Retro-Inverso Syn03 Root Hair Promoting | RENGTRAARIGG |
| Peptide (RHPP) | |
| SEQ ID NO: 764 | |
| Retro-Inverso Syn04 Root Hair Promoting | REKGTPAARIGG |
| Peptide (RHPP) | |
| SEQ ID NO: 765 | |
| Retro-Inverso Syn05 Root Hair Promoting | RENGTPSARIGG |
| Peptide (RHPP) | |
| SEQ ID NO: 766 | |

[0224] The RHPP and RI-RHPPs described in Tables 11 to 13 can also be provided as isolated polypeptides. Accordingly, an isolated polypeptide is provided wherein the polypeptide has an amino acid sequence comprising or consisting of any one of SEQ ID NOs: 745-766.

[0225] For example, the amino acid sequence of the isolated polypeptide can consist of any one of SEQ ID NOs: 745-766.

[0226] The amino acid sequence of the isolated polypeptide can comprise or consist of any one of SEQ ID NOs: 746-755 and 757-766.

[0227] The amino acid sequence of the isolated polypeptide can comprise or consist of any one of SEQ ID NOs: 746-755 and 757-766.

[0228] The amino acid sequence of the isolated polypeptide can comprise or consist of any one of SEQ ID NOs: 746-750 and 757-761.

[0229] The amino acid sequence of the isolated polypeptide can comprise or consist of any one of SEQ ID NOs: 746, 748, 749, 750, 757, 759, 760, and 761.

[0230] The amino acid sequence of the isolated polypeptide can comprise or consist of any one of SEQ ID NOs: 747 and 758.

### Thionins and Thionin-Targeting Polypeptides

[0231] The composition can comprise at least one thionin or thionin-like polypeptide.

[0232] The thionin or thionin-like polypeptide can be fused to a phloem targeting sequence to form a fused polypeptide The amino acid sequence of the phloem targeting sequence can comprise any one of SEQ ID NOs: 611-619, or any combination thereof, for delivering the fused polypeptide to vascular tissue or cells and/or phloem or phloem-associated tissue or cells in the plant or plant part.

[0233] The amino acid sequence of the phloem targeting sequence can comprise SEQ ID NO: 611.

[0234] More specifically, targeting sequences useful for targeting AMP polypeptides, such as thionins or Flg polypeptides to the vascular tissues (xylem and phloem) can be extremely useful for treating diseases that colonize restricted tissues involved in the transport of fluids and nutrients (e.g., water soluble nutrients, sugars, amino acids, hormones, etc.). Vascular tissues such as the xylem transport and store water and water-soluble nutrients and the phloem cells transport sugars, proteins, amino acids, hormones and other organic molecules in plants.

[0235] Preferred vascular/phloem targeting polypeptides useful for targeting the thionins and flagellin-associated polypeptides as described herein are provided in Table 14.

TABLE 14
Phloem targeting polypeptides

| SEQ ID NO: | Vascular/Phloem targeting polypeptides |
|---|---|
| Phloem targeting peptide | MSTATFVDIIIAILLPPLGVFLRFGCGVE |
| Synthetic | FWICLVLTLLGYIPGIIYAIYVLTK |
| SEQ ID NO: 611 | |
| Salt stress induced targeting peptide | MGSETFLEVILAILLPPVGVFLRYGCGV |
| Citrus clementina | EFWICLLLTVLGYIPGIIYAIYVLVG |
| SEQ ID NO: 612 | |
| Hypothetical protein CICLE | MGTATCVDIILAVILPPLGVFLKFGCKA |
| Citrus trifoliata | EFWICLLLTILGYIPGIIYAVYVITK |
| SEQ ID NO: 613 | |
| Hypothetical protein CICLE | MADEGTATCIDIILAIILPPLGVFLKFGC |
| Citrus sinensis | KVEFWICLLLTIFGYIPGIIYAVYAITKN |
| SEQ ID NO: 614 | |
| Low temperature and salt responsive protein | MADGSTATCVDILLAVILPPLGVFLKFG |
| Citrus sinensis | CKAEFWICLLLTILGYIPGIIYAVYAITK |
| SEQ ID NO: 615 | K |
| Hypothetical protein CICLE | FYKQKYQVQITKAVTQNPKHFFNQSSC |
| Citrus | FLTLNFILFHFTLFKNQSKMADGSTATC |
| clementina | VDILLAVILPPLGVFLKFGCKAEFWICL |
| SEQ ID NO: 616 | LLTILGYIPGIIYAVYAITKK |
| Low temperature and salt responsive protein | MSTATFVDIIIAILLPPLGVFLRFGCGVE |
| Arabidopsis thaliana | FWICLVLTLLGYIPGIIYAIYVLTK |
| SEQ ID NO: 617 | |
| Cold-inducible protein | MSTATFVDIIIAVLLPPLGVFLRFGCGV |
| Camelina sativa | EFWICLVLTLLGYIPGIIYAIYVLTK |
| SEQ ID NO:618 | |
| Low temperature and salt responsive protein | MGTATCVDIIIAILLPPLGVFLRFGCGVE |
| Arabidopsis lyrata | FWICLVLTLLGYIPGILYALYVLTK |
| SEQ ID NO: 619 | |

[0236] A synthetic version of a phloem targeting polypeptide (SEQ ID NO: 611) is particularly useful in targeting anti-microbial polypeptides to the phloem sieve tube and companion cells.

[0237] Anti-microbial thionin polypeptides are also provided (Table 15) and are utilized with the phloem targeting sequences provided in Table 14 for targeting the thionin sequences into the phloem tissues of citrus as well as other plants.

[0238] The amino acid sequence of the thionin or thionin-like polypeptide can comprise any one of SEQ ID NOs: 620-719, such as SEQ ID NO: 620.

TABLE 15
Thionin and thionin-like sequences

| SEQ ID NO: | Thionin or Thionin-like Sequences- Amino Acid |
|---|---|
| Thionin-like protein | RTCESQSHRFKGPCSRDSNCATVCLTEGFSG |
| Synthetic | GDCRGFRRRCRCTRPCVFDEK |
| SEQ ID NO: 620 | |
| Thionin-like protein | RVCQSQSHHFHGACFSHEINCAFVCRNEGFS |
| Citrus sinensis | GGKCRGVRRRCFCSKLC |
| SEQ ID NO: 621 | |
| Thionin-like protein | KSCCKDIMARNCYNVCRIPGTPRPVCATTCR |
| Avena sativa | CKIISGNKCPKDYPK |
| SEQ ID NO: 622 | |
| Thionin-like protein | RTCESQSHRFKGPCSRDSNCATVCLTEGFSG |
| Synthetic | GDCRGFRRRCRCTRPCVFDEK |
| SEQ ID NO: 623 | |
| Thionin-like protein | MDSRSFGLLPLLLLILLTSQMTVLQTEARLCE |
| Citrus sinensis | SQSHRFHGTCVRSHNCDLVCRTEGFTGGRC |
| SEQ ID NO: 624 | RGFRRRCFCTRIC |
| Proteinase inhibitor se60-like protein | MKSFFGIFLLLLILFASQEIMVPAEGRVCQSQ |
| Citrus paradise | SHHFHGACFSHEINCAFVCRNEGFSGGKCRG |
| SEQ ID NO: 625 | VRRRCFCSKLC |
| Defensin precursor | MKSFFGIFLLLLILFASQMMVPAEGRVCQSQ |
| Citrus clementina | SHHFHGACFSHEINCAFVCRNEGFSGGKCRG |
| SEQ ID NO: 626 | ARRRCFCSKLC |
| defensin precursor | MKSFFGIFLLLLILFASQEMMVPAEGRVCQS |
| Citrus clementina | QSHHFHGACFSHEINCAFVCRNEGFSGGKCR |
| SEQ ID NO: 627 | GARRRCFCSKLC |
| Thionin-like protein | MKSFFGIFLLLLILFASQMMVPAEGRVCQSQ |
| Citrus clementina | SHHFHGACFSHEINCAFVCRNEGFSGGKCRG |
| SEQ ID NO: 628 | ARRRCFCSKLC |
| Thionin-like peptide | MANSMRFFATVLLLALLVMATEMGPMTIAE |
| Nicotiana benthamiana | ARTCESQSHRFKGPCSRDSNCATVCLTEGFS |
| SEQ ID NO: 629 | GGDCRGFRRRCFCTRPC |
| Thionin-like protein | MAKSMRFFATVLLLALLVMATEMGPTTIAE |
| Nicotiana sylvestris | ARTCESQSHRFKGPCSRDSNCATVCLTEGFS |
| SEQ ID NO: 630 | GGDCRGFRRRCFCTRPC |
| Thionin-like protein | MANSMRFFATVLLLTLLVMATEMGPMTIAE |
| Nicotiana tabaccum | ARTCESQSHRFKGPCSRDSNCATVCLTEGFS |
| SEQ ID NO: 631 | GGDCRGFRRRCFCTRPC |
| Thionin-like protein | MANSMRFFATVLLIALLVMATEMGPMTIAE |
| Nicotiana tomentosiformis | ARTCESQSHRFKGPCSRDSNCATVCLTEGFS |
| SEQ ID NO: 632 | GGDCRGFRRRCFCTRPC |
| Thionin-like protein | MANSMRFFATVLLIALLVTATEMGPMTIAEA |
| Nicotiana tabaccum | RTCESQSHRFKGPCSRDSNCATVCLTEGFSG |
| SEQ ID NO: 633 | GDCRGFRRRCFCTRPC |
| Defensin class I | MANSMRFFATVLLLTLLFMATEMGPMTIAE |
| Nicotiana alata | ARTCESQSHRFKGPCARDSNCATVCLTEGFS |
| SEQ ID NO: 634 | GGDCRGFRRRCFCTRPC |
| Leaf thionin | MGSIKGLKSVVICVLVLGIVLEQVQVEGKSC |
| Avena sativa | CKDIMARNCYNVCRIPGTPRPVCATTCRCKII |
| SEQ ID NO: 635 | SGNKCPKDYPKLHGDPD |
| Leaf thionin | MGSIKGLKSVVICVLVLGIVLEHVQVEGKSC |
| Avena sativa | CKDTTARNCYNVCRIPGTPRPVCATTCRCKII |
| SEQ ID NO: 636 | SGNKCPKDYPKLHGDLD |
| Thionin Class I | LGLVVAQTQVDAKSCCPSTAARNCYNVCRF |
| Tulipa gesneriana | PGTPRPVCAATCGCKIITGTKCPPDYPKLGW |
| SEQ ID NO: 637 | STFQNSDVADKALDVVDEALHVAKEVMKE |
| | AVERCNNACSEVCTKGSYAVTA |
| Thionin-like protein Class I | MERKSLGFFFFLLLILLASQEMVVPSEARVCE |
| Vitis vinifera | SQSHKFEGACMGDHNCALVCRNEGFSGGKC |
| SEQ ID NO: 638 | KGLRRRCFCTKLC |
| Thionin-like protein Class I | MERKSLGFFFFLLLILLASQMVVPSEARVCES |
| Vitis vinifera | QSHKFEGACMGDHNCALVCRNEGFSGGKC |
| SEQ ID NO: 639 | KGLRRRCFCTKLC |
| defensin Ec-AMP-D1 | MERSVRLFSTVLLVLLLLASEMGLRAAEARI |
| Citrus sinensis | CESQSHRFKGPCVSKSNCAAVCQTEGFHGG |
| SEQ ID NO: 640 | HCRGFRRRCFCTKRC |
| Antimicrobial Protein 1 (Ah- Amp1) | LCNERPSQTWSGNCGNTAHCDKQCQDWEK |
| Aesculus hippocastanum | ASHGACHKRENHWKCFCYFNC |
| SEQ ID NO: 641 | |
| hypothetical protein DCAR | MAKNSTSPVSLFAISLIFFLLANSGSITEVDGK |
| Dacus carota | VCEKPSLTWSGKCGNTQHCDKQCQDWEGA |
| SEQ ID NO: 642 | KHGACHSRGGWKCFCYFEC |
| Cysteine-rich antimicrobial protein | NLCERASLTWTGNCGNTGHCDTQCRNWES |
| Clitoria ternatea | AKHGACHKRGNWKCFCYFNC |
| SEQ ID NO: 643 | |
| hypothetical protein DCAR | MAKKSSSFCLSAIFLVLLLVANTGMVREVDG |
| Dacus carota | ALCEKPSLTWSGNCRNTQHCDKQCQSWEG |
| SEQ ID NO: 644 | AKHGACHKRGNWKCFCYHAC |
| Thionin-like | MAKKLNAVTVSAIFLVVFLIASYSVGAAKEA |
| Bupleurum kaoi | GAEGEVVFPEQLCERASQTWSGDCKNTKNC |
| SEQ ID NO: 645 | DNQCIQWEKARHGACHKRGGKWMCFCYFD |
| | KC |
| defensin Dm-AMP1 = cysteine-rich | ELCEKASKTWSGNCGNTGHCDNQCKSWEG |
| antimicrobial protein | AAHGACHVRNGKHMCFCYFNC |
| Dahlia merckii | |
| SEQ ID NO: 646 | |
| Thionin-like | MAKISVAFNAFLLLLFVLAISEIGSVKGELCE |
| Helianthus annuus | KASQTWSGTCGKTKHCDDQCKSWEGAAHG |
| SEQ ID NO: 647 | ACHVRDGKHMCFCYFNCSKAQKLAQDKLR |
| | AEELAKEKIEPEKATAKP |
| Thionin | MAKNSVAFFALLLLICILTISEFAVVKGELCE |
| Cynara cardunculus var. scolymus | KASKTWSGNCGNTRHCDDQCKAWEGAAH |
| SEQ ID NO: 648 | GACHTRNKKHMCFCYFNCPKAEKLAQDKL |
| | KAEELARDKVEAKEVPHFKHPIEPIHHP |
| Thionin | MAKQWVSFFALAFIVFVLAISETQTVKGELC |
| Cynara cardunculus var. scolymus | EKASKTWSGNCGNTKHCDDQCKSWEGAAH |
| SEQ ID NO: 649 | GACHVRNGKHMCFCYFNSCAEADKLSEDQI |
| | EAGKLAFEKAEKLDRDVKKAVPNVDHP |
| defensin-like protein 1 - DCAR-like | MAQKVNSALIFSAIFVLFLVASYSVTVAEGA |
| Daucus carota subsp. Sativus | RAGAEGEVVYPEALCERASQTWTGKCQHTD |
| SEQ ID NO: 650 | HCDNQCIQWENARHGACHKRGGNWKCFCY |
| | FDHC |
| low-molecular-weight cysteine-rich | MASSYTLMLFLCLSIFLIASTEMMAVEARICE |
| defensin | RRSKTWTGFCGNTRGCDSQCKSWERASHGA |
| Arabidopsis lyrata | CHAQFPGFACFCYFNC |
| SEQ ID NO: 651 | |
| Thionin-like protein | MAKSSTSYLVFLLLVLVVAISEIASVNGKVC |
| Parthenium hysterophorus | EKPSKTWFGNCKDTEKCDKRCMEWEGAKH |
| SEQ ID NO: 652 | GACHQRESKYMCFCYFDCDP |
| putative defensin AMP1 protein | MASSYTLMLFLCLSIFLIASTEMMAVEGRICE |
| Arabidopsis thaliana | RRSKTWTGFCGNTRGCDSQCKRWERASHG |
| SEQ ID NO: 653 | ACHAQFPGFACFCYFNC |
| Thionin-like | MASSYTLLLFVCLSIFFIASTEMMMVEGRVC |
| Eutrema salsugineum | ERRSKTWTGFCGNTRGCDSQCKRWERASHG |
| SEQ ID NO: 654 | ACHAQFPGFACFCYFNC |
| defensin-like | MAKLLGYLLSYALSFLTLFALLVSTEMVML |
| Vitis vinifera | EAKVCQRPSKTWSGFCGSSKNCDRQCKNWE |
| SEQ ID NO: 655 | GAKHGACHAKFPGVACFCYFNC |
| Knottin | MAKSLSSFATFLALLCLFFLLSTPNEMKMAE |
| Corchorus olitorius | AKICEKRSQTWSGWCGNSSHCDRQCKNWE |
| SEQ ID NO: 656 | NARHGSCHADGLGWACFCYFNC |
| Knottin | MEMKMAEGKICEKRSQTWSGWCGNSSHCD |
| Corchorus olitorius | RQCKNWENARHGSCHADGLGWACFCYFNC |
| SEQ ID NO: 657 | |
| Thionin-like protein Camelina sativa | MASSLKLMLFLCLSIFLIASTEMMTVEGRTC |
| SEQ ID NO: 658 | ERRSKTWTGFCGNTRGCDSQCRSWEGASHG |
| | ACHAQFPGFACFCYFNC |
| Thionin-like protein Cucumis sativus | MAKVVGNSAKMIVALLFLLALMLSMNEKQ |
| SEQ ID NO: 659 | GVVEAKVCERRSKTWSGWCGNTKHCDRQC |
| | KNWEGATHGACHAQFPGRACFCYFNC |
| Thionin-like protein | MIDAFNYKQFSTVKGKICEKPSKTWFGKCQ |
| Cynara cardunculus var. scolymus | DTTKCDKQCIEWEDAKHGACHERESKLMCF |
| SEQ ID NO: 660 | CYYNCGPPKNTPPGTPPSPP |
| Thionin-like | MASSYKLILFLCLSIFLIASFEMMAVEGRICQ |
| Capsella rubella | RRSKTWTGFCGNTRGCDSQCKRWERASHG |
| SEQ ID NO: 661 | ACHAQFPGFACFCYFNC |
| Thionin | MMAVEGRICERRSKTWTGFCGNTRGCDSQC |
| Arabidopsis thaliana | KRWERASHGACHAQFPGFACFCYFNC |
| SEQ ID NO: 662 | |
| Thionin | MASSYTRLLLLCLSIFLIASTEVMMVEGRVC |
| Brassica napus | QRRSKTWTGFCGNTRGCDSQCKRWERASH |
| SEQ ID NO: 663 | GACHAQFPGFACFCYFNC |
| Thionin-like protein Brassica rapa | MASSYARLLLLCLSIFLIASTEVNINIVEGRVC |
| SEQ ID NO: 664 | QRRSKTWTGFCGNTRGCDSQCKRWERASH |
| | GACHAQFPGFACFCYFNC |
| Thionin-like protein Camelina sativa | MASSLKLMLFLCLSIFLIASTEMMTVEGRTC |
| SEQ ID NO: 665 | ERRSKTWTGFCGNTRGCDSQCRRWEHASHG |
| | ACHAQFPGFACFCYFNC |
| defensin-like protein Brassica napus | MASYTRLLLLCLSIFLIASTEVNINIVEGRVCQ |
| SEQ ID NO: 666 | RRSKTWTGFCGNTRGCDSQCKRWERASHG |
| | ACHAQFPGFACFCYFNC |
| Thionin-like protein Vitis vinifera | MVMLEAKVCQRPSKTWSGFCGSSKNCDRQ |
| SEQ ID NO: 667 | CKNWEGAKHGACHAKFPGVACFCYFNC |
| Thionin-like protein | MTKSFILVALLCICFILLSPTEMRLTLNACLK |
| Brassica napus | LAEAKICEKYSQTWSGRCTKTSHCDRQCIN |
| SEQ ID NO: 668 | WEDARHGACHQDKHGRACFCYFNCKK |
| Thionin-like protein | MASSYTVFLLLCLSIFLIASTEVMMVEGRVC |
| Raphanus sativus | QRRSKTWTGFCGNTRGCDSQCKRWEHASH |
| SEQ ID NO: 669 | GACHAQFPGFACFCYFNC |
| Thionin-like | MASSYTLLLFLCLSIFLIVSTEMNINIVEGRICE |
| Arabis alpine | RRSKTWTGFCANTRGCDSQCKRWERASHG |
| SEQ ID NO: 670 | ACHAQFPGVACFCYFNC |
| Thionin-like protein | MAKVVGNSAKMIVAFLFLLALTLSMNEKQG |
| Cucumis melo | VVEAKVCERRSKTWSGWCGDTKHCDRQCK |
| SEQ ID NO: 671 | NWEGAKHGACHAQFPGRACFCYFNC |
| Thionin-like protein | MAASLVYRLSSVILIVLLLFIMLNNEVMVVE |
| Erythranthe guttate | SRLCERRSKTWTGFCGSSNNCNNQCRNWER |
| SEQ ID NO: 672 | ASHGACHAQFPGFACFCYFNC |
| Thionin-like protein Sesamum indicum | MAKFQVSSTIFFALFFCFLLLASNEAKICQRNI |
| SEQ ID NO: 673 | SKTWSGVCLNSGNCDRQCRNWERAQHGAC |
| | HRRGLGFACLCYFKC |
| Thionin-like protein | MAKNSVAFFAFLLILFVLAISEIGSVKGELCE |
| Eclipta prostrata | KASQTWSGTCRITSHCDNQCKSWEGAAHGA |
| SEQ ID NO: 674 | CHVRGGKHMCFCYFSHCAKAEKLTQDKLK |
| | AGHLVNEKSEADQKVPVTP |
| Gamma thionin Cynara cardunculus var. | MAKNTKVSAFLFVFLFVFFLVVHSVTAFAIR |
| scolymus | FKCFDTDMLLKVIADMVVGMKGIEKVCRRR |
| SEQ ID NO: 675 | SKTWSGYCGDSKHCDQQCREWEGAEHGAC |
| | HHEGLGRACFCYFNC |
| Art v 1 precursor Ambrosia artemisiifolia | MAAGLLVFVLAISEIASVKGKLCEKPSVTWS |
| SEQ ID NO: 676 | GKCKVKQTDKCDKRCIEWEGAKHGACHKR |
| | DSKASCFCYFDCDPTKNPGPPPGAPKGKAPA |
| | PSPPSGGGGEGGGEGGGER |
| Art v 1 precursor Ambrosia | MAAGLLVFVLAISEIASVKGKLCEKPSLTWS |
| artemi679siifolia | GKCKVKQTDKCDKRCIEWEGAKHGACHKR |
| SEQ ID NO: 677 | DSKATCFCYFDCDPTKNPGPPPGAPKGKAPA |
| | PSPPSGGGAPPPSGGEGGER |
| Thionin-like protein Jatropha curcas | MAKLHSSALCFLIIFLFLLVSKEMAVTEAKLC |
| SEQ ID NO: 678 | QRRSKTWSGFCGDPGKCNRQCRNWEGASH |
| | GACHAQFPGFACFCYFKC |
| Thionin-like protein Nelumbo nucifera | MAKAPKSVSYFAFFFILFLLASSEIQKTKKLC |
| SEQ ID NO: 679 | ERRSKTWSGRCTKTQNCDKQCKDWEYAKH |
| | GACHGSWFNKKCYCYFDC |
| Thionin-like protein Pyrus x | MAKLLSRLSIPLIVFVFLLILLASTEVAMVEA |
| bretschneideri | RICQRRSKTWSGFCANTGNCNRQCTNWEGA |
| SEQ ID NO: 680 | LHGACHAQFPGVACFCYFRC |
| Low-molecular-weight cysteine-rich | MAKLHFPTLLCLFIFLFLLVSTEMQVTQAKV |
| protein LCR78 precursor | CQRRSKTWSGFCGSTKNCDRQCKNWEGAL |
| Ricinus communi | HGACHAQFPGVACFCYFKCGGER |
| SEQ ID NO: 681 | |
| homologue of Art v 1 precursor | KLCEKPSVTWSGKCKVKQTDKCDKRCIEWE |
| Ambrosia artemisiifolia | GAKHGACHKRDSKASCFCYFDCDPTKNPGP |
| SEQ ID NO: 682 | PPGAPKGKAPAPSPPSGGGAPPPSGGEGGGD |
| homologue of Art v 1 precursor | KLCEKPSVTWSGNKVKQTDKCDKRCIEWEG |
| Ambrosia artemisiifolia | AKHGACHKRDSKASCFCYFDCDPTKNPGPP |
| SEQ ID NO: 683 | PGAPKGKAPAPSPPSGGGAPPPSGGEGGGDG |
| | GGGRR |
| Thionin-like protein | MAKLLSHLLFYPILFLFLFIFLASTEVAILEARI |
| Prunus mume | CQRRSKTWSGFCGNTRNCNRQCRNWEGAL |
| SEQ ID NO: 684 | RGACHAQFPGFACFCYFRC |
| Knottin | MAKTLQLFALFFIVILLANQEIPVAEAKLCQK |
| Corchorus olitorius | RSKTWTGICIKTKNCDNQCKKWEKAEHGAC |
| SEQ ID NO: 685 | HRQGIGFACFCYFNQKKC |
| Knottin | MAKFVSTVALLFALFILLASFDEGMMPMAE |
| Corchorus olitorius | AKVCSKRSKTWSGFCNSSANCNKQCREWED |
| SEQ ID NO: 686 | AKHGACHFEFPGFACFCYFNC |
| Thionin-like protein Solanum pennellii | MNSKVILALLVCFLLIASNEMQGGEAKVCG |
| SEQ ID NO: 687 | RRSSTWSGLCLNTGNCNTQCIKWEHASSGA |
| | CHRDGFGFACFCYFNC |
| Thionin-like protein | MAKLLGYHLVYPILFLFIFLLLASTEMGMLE |
| Fragaria vesca subsp. Vesca | ARICQRRSKTWTGLCANTGNCHRQCRNWE |
| SEQ ID NO: 688 | GAQRGACHAQFPGFACFCYFNC |
| Knottin | MAKFVSVALLLALFILVASFDEGMVPMAEA |
| Corchorus capsularis | KLCSKRSKTWSGFCNSSANCNRQCREWEDA |
| SEQ ID NO: 689 | KHGACHFEFPGFACFCYFDC |
| Thionin-like protein Solanum tuberosum | MQGGEARVCERRSSTWSGPCFDTGNCNRQC |
| SEQ ID NO: 690 | INWEHASSGACHREGIGSACFCYFNC |
| Defensin 1.2-like protein PDF1.2-1 | MAKTLKSVQFFALFFLVILLAGSEMTAVEAL |
| Dimocarpus longan | CSKRSKTWSGPCFITSRCDRQCKRWENAKH |
| SEQ ID NO: 691 | GACHRSGWGFACFCYFNKC |
| Thionin-like protein Camelina sativa | MAKAATIVTLLFAALVFFAALETPTMVEAQ |
| SEQ ID NO: 692 | KLCERPSGTWSGVCGNSNACKNQCINLEKA |
| | RHGSCNYVFPAHKCICYFPC |
| Thionin-like | MAKFASIIAFLFAALVLFASFEAPTMVEAQK |
| Arabis alpine | YCEKPSGTWSGVCGNSNACNNQCINLEGAR |
| SEQ ID NO: 693 | HGSCNYVFPYYRCICYFQC |
| Thionin-like | MAMSLKSVHFFALFFIVVLLANQEMPVAEA |
| Theobroma cacao | KLCQKRSKTWTGPCIKTKNCDHQCRKWEK |
| SEQ ID NO: 694 | AQHGACHWQWPGFACFCYVNC |
| Thionin-like | MAKLVSPKAFFVFLFVFLLISASEFSGSEAKL |
| Amborella trichopoda | CQKRSRTWSGFCANSNNCSRQCKNLEGARF |
| SEQ ID NO: 695 | GACHRQRIGLACFCYFNC |
| low-molecular-weight cysteine-rich 67 | MAKSATIVTLFFAALVFFAALEAPMVVEAQ |
| Arabidopsis thaliana | KLCERPSGTWSGVCGNSNACKNQCINLEKA |
| SEQ ID NO: 696 | RHGSCNYVFPAHKCICYFPC |
| Thionin-like | MAKFASIITLLFAALVLFASLEAPTMVEAQK |
| Arabis alpine | LCQRPSGTWSGVCGNNGACKNQCINLEKAR |
| SEQ ID NO: 697 | HGSCNYVFPYHRCICYFPC |
| Thionin-like | MAKVASIIALLFAALVLFAAFEAPTMVEAQK |
| Brassica juncea | LCERPSGTWSGVCGNNNACKNQCINLEKAR |
| SEQ ID NO: 698 | HGSCNYVFPAHKCICYFPC |
| Thionin-like | MAKFASIIALLFAALVLFAALEAPTMVEAQK |
| Brassica oleracea var. oleracea | LCERPSGTWSGVCGNNNACKNQCINLEKAR |
| SEQ ID NO: 699 | HGSCNYVFPAHKCICYFPC |
| Thionin-like | MAKPATIVTLLFAALVFFAALETPTMVEAQK |
| Camelina sativa | LCERPSGTWSGVCGNNNACKNQCINLEKAR |
| SEQ ID NO: 700 | HGSCNYVFPAHKCICYFPC |
| Thionin-like | MAKSATIVTLLFAALVFFAALETPTMVEAQK |
| Camelina sativa | LCERPSGTWSGVCGNNNACKNQCINLEKAR |
| SEQ ID NO: 701 | HGSCNYVFPAHKCICYFPC |
| Thionin-like | MAKFASIIAPLFAVLVLFAAFEAPTMVEAQK |
| Brassica napus | LCERPSGTWSGVCGNNNACKNQCINLEKAR |
| SEQ ID NO:702 | HGSCNYVFPAHKCICYFPC |
| Thionin-like | MAKFASIITLLFAALVLFAVFEGPTMVEAQK |
| Eutrema salsugineum | LCERPSGTWSGVCGNNNACKNQCINLEKAR |
| SEQ ID NO: 703 | HGSCNYVFPAHKCICYFPC |
| Cysteine-rich antifungal protein | MAKFASIIALLFAALVLFAAFEAPTMVEAQK |
| Raphanus sativus | LCERPSGTWSGVCGNNNACKNQCINLEKAR |
| SEQ ID NO: 704 | HGSCNYVFPAHKCICYFPC |
| Thionin-like protein 1 Raphanus sativus | MAKFASIVSLLFAALVLFTAFEAPAMVEAQK |
| SEQ ID NO: 705 | LCERPSGTWSGVCGNNNACKNQCINLEKAR |
| | HGSCNYVFPAHKCICYFPC |
| Thionin-like protein 1 Raphanus sativus | MNTKVILALLFCFLLVASNEMQVGEAKVCQ |
| SEQ ID NO: 706 | RRSKTWSGPCINTGNCSRQCKQQEDARFGA |
| | CHRSGFGFACFCYFKC |
| Thionin-like | MAKFASIIAPLFAALVLFAAFEAPTMVEAQK |
| Brassica rapa | LCERPSGTWSGVCGNNNACKNQCINLEKAR |
| SEQ ID NO: 707 | HGSCNYVFPAHKCICYFPC |
| Thionin-like | MNTKLILALMFCFLLIASNEMQVGEAKVCQ |
| Solanum pennellii | RRSKTWSGPCINTGNCSRQCKQQEDARFGA |
| SEQ ID NO: 708 | CHRSGFGFACFCYFKC |
| Thionin-like | MAKFTTTFALLFAFFILFAAFDVPMAEAKVC |
| Citrus clementina | QRRSKTWSGLCLNTGNCSRQCKQQEDARFG |
| SEQ ID NO: 709 | ACHRQGIGFACFCYFKC |
| Thionin-like | MAKFTSIIVLLFAALVLFAGFEAPTMVEAQK |
| Brassica rapa | LCERPSGTWSGVCGNNNACKNQCIRLEKAR |
| SEQ ID NO: 710 | HGSCNYVFPARKCICYFPC |
| Thionin-like | MAKFASIITLLFAALVLFATFAPTMVEAKLC |
| Eutrema salsugineum | ERPSGTWSGVCGNNNACKSQCQRLEGARHG |
| SEQ ID NO: 711 | SCNYVFPAHKCICYFPC |
| Thionin-like | MAKFASIITLLFAALVLFATFEAPTMVEAKL |
| Eutrema salsugineum | CERPSGTWSGVCGNNNACKSQCQRLEGARH |
| SEQ ID NO: 712 | GSCNYVFPAHKCICYFPC |
| Thionin-like | MAKFASIIAFFFAALVLFAAFEAPTIVEAQKL |
| Heliophila coronopifolia | CERPSGTWSGVCGNNNACRNQCINLEKARH |
| SEQ ID NO: 713 | GSCNYVFPAHKCICYFPC |
| Thionin-like | MAKVASIVALLFPALVIFAAFEAPTMVEAQK |
| Brassica oleracea | LCERPSGTWSGVCGNNNACKNQCIRLEKAR |
| SEQ ID NO: 714 | HGSCNYVFPAHKCICYFPC |
| Thionin-like | MSKFYTVFMFLCLALLLISSWEVEAKLCQRR |
| Cicer arietinum | SKTWSGPCIITGNCKNQCKNVEHATFGACHR |
| SEQ ID NO: 715 | QGFGFACFCYFNCH |
| Thionin-like | MAKSVASITTAFALIFAFFILFASFGVPMAEA |
| Citrus clementina | KVCQRRSKTWSGPCLNTGKCSRQCKQQEYA |
| SEQ ID NO: 716 | RYGACYRQGAGYACYCYFNC |
| Thionin-like | MAKSVASITTAFALIFAFFILFASFEVPMAEA |
| Citrus sinensis | KVCQRRSKTWSGPCLNTGKCSRHCKQQEDA |
| SEQ ID NO: 717 | RYGACYRQGTGYACFCYFEC |
| Thionin-like | MAKFTTTFALLFAFFILFAAFDVPMAEAKVC |
| Citrus sinensis | QLRSKTWSGLCLNTGNCSRQCKQQEDARFG |
| SEQ ID NO: 718 | ACHRQGIGFACFCYFKC |
| Ec-AMP -D1 | MERSVRLFSTVLLVLLLLASEMGLRAAEARI |
| Citrus sinensis | CESQSHRFKGPCVSKSNCAAVCQTEGFHGG |
| SEQ ID NO: 719 | HCRGFRRRCFCTKRC |

[0239] The composition can comprise a fusion protein.

[0240] Table 16 (SEQ ID NO: 720) describes the sequences used to make a translational fusion using the nucleotide sequence that encodes the synthetic phloem targeting polypeptide (SEQ ID NO: 611) with a synthetic thionin polypeptide (SEQ ID NO: 620). The upper case (not bold) font sequence identifies the phloem targeting sequence, the upper case bold font identifies the thionin polypeptide. Table 16 depicts SEQ ID NO: 720 which represents the fusion of these two peptide sequences resulting in a phloem targeted bioactive priming polypeptide.

TABLE 16
Translational fusion of a phloem targeting sequence with a thionin derived
polypeptide
Translational fusion phloem targeting sequence with thionin polypeptide (synthetic):
SEQ ID NO: 720
MSTATFVDIIIAILLPPLGVFLRFGCGVEFWICLVLTLLGYIPGIIYAIYVLTKRTCESQS
HRFKGPCSRDSNCATVCLTEGFSGGDCRGFRRRCRCTRPCVFDEK

[0241] Serine Proteases

[0242] The composition can comprise at least one serine protease. The serine proteases provided herein comprise proteins or catalytic domains of proteins that belongs to the serine protease family. The full lengthproteins (e.g., SEQ ID NOs: 722 or 795) contain a type II transmembrane domain, a receptor class A domain, a scavenger receptor cysteine-rich domain and a protease domain. Serine proteases can inhibit other proteases in plants and function in protecting the plant against herbivorous insects by inhibiting digestive proteases. Compositions prepared herein with serine proteases can be particularly effective at protecting against HLB disease causing psyllids. Serine proteases can also be effective for disrupting bacterial biofilms through cleavage of protein components, thereby reducing bacterial survival and reducing spread of bacteria within or on a plant, or plant part.

[0243] For ease of reference, illustrative serine protease amino acid sequences are provided in Table 17 below, together with their SEQ ID NOs. The compositions herein can comprise a serine protease having an amino acid sequence comprising any one of SEQ ID NOs: 721, 722, and 794-796. The compositions herein can comprise a serine protease having an amino acid sequence comprising SEQ ID NO: 722 or 795. The compositions herein can comprise a serine protease having an amino acid sequence comprising SEQ ID NO: 794 or 796.

[0244] The serine protease can comprise a truncated version of SEQ ID NO: 722 comprising the catalytic domain of the full-length protein. For example, the amino acid sequence of the serine protease can comprise SEQ ID NO: 794 (Table 17). Accordingly, the compositions herein can comprise a serine protease having an amino acid sequence comprising SEQ ID NO: 794.

[0245] The amino acid sequence of serine protease 2 (SEQ ID NO: 795) provided in Table 17 was cloned from a proprietary library from Bacillus subtilis and comprises four amino acid substitutions relative to the native sequence (SEQ ID NO: 722), which confer a polypeptide with serine protease activity. In some compositions, the serine protease can comprise a truncated version of SEQ ID NO: 795 comprising the catalytic domain of the full-length protein. For example, the amino acid sequence of the serine protease can comprise SEQ ID NO: 796 (Table 17). Accordingly, the compositions herein can comprise a serine protease having an amino acid sequence comprising SEQ ID NO: 796.

[0246] The native amino acid sequence of the serine protease of SEQ ID NO: 722 includes the signal peptide MKKGIIRFLLVSFVLFFALSTGITGVQAAPA (SEQ ID NO: 797) at the amino-terminus of the sequence, immediately preceding the first amino acid of SEQ ID NO: 722. This signal peptide is not included in SEQ ID NO: 722. However, the signal peptide of SEQ ID NO: 797, or another signal peptide, can optionally be included at the amino terminus of the serine proteases of any of SEQ ID NO: 721-722, 794-796, or at the amino-terminus of any of the other peptides described herein.

TABLE 17
Serine Proteases

| SEQ ID NO: | Serine Protease Sequences- Amino Acid |
|---|---|
| Protease 1 (Bsub 168 aprX) | MFGYSMVQMVRANAHKLDWPLRETVLQLYKPFKWTPCF |
| (Bacillus subtilis subsp. | LHKFFETKLQNRKKMSVIIEFEEGCHETGFQMAGEVLQKE |
| subtilis str. 168) | KRSKLKSRFNKINCCSAEVTPSALHSLLSECSNIRKVYLNR |
| SEQ ID NO: 721 | EVKALLDTATEASHAKEVVRNGQTLTGKGVTVAVVDTGI |
| | YPHPDLEGRIIGFADMVNQKTEPYDDNGHGTHCAGDVAS |
| | SGASSSGQYRGPAPEANLIGVKVLNKQGSGTLADIIEGVE |
| | WCIQYNEDNPDEPIDIMSMSLGGDALRYDHEQEDPLVRAV |
| | EEAWSAGIVVCVAAGNSGPDSQTIASPGVSEKVITVGALD |
| | DNNTASSDDDTVASFSSRGPTVYGKEKPDILAPGVNIISLR |
| | SPNSYIDKLQKSSRVGSQYFTMSGTSMATPICAGIAALILQ |
| | QNPDLTPDEVKELLKNGTDKWKDEDPNIYGAGAVNAENS |
| | VPGQ |
| Serine Protease 2 | SSKTSADLEKAEVFGDIDMTTSKKTTVIVELKEKSLAEAKE |
| Bacillus subtilis subsp. | AGESQSKSKLKTARTKAKNKAIKAVKNGKVNREYEQVFS |
| Substilis str. 168, native | GFSMKLPANEIPKLLAVKDVKAVYPNVTYKTDNMKDKD |
| SEQ ID NO: 722 | VTISEDAVSPQMDDSAPYIGANDAWDLGYTGKGIKVAIID |
| | TGVEYNHPDLKKNFGQYKGYDFVDNDYDPKETPTGDPRG |
| | EATDHGTHVAGTVAANGTIKGVAPDATLLAYRVLGPGGS |
| | GTTENVIAGVERAVQDGADVMNLSLGNSLNNPDWATSTA |
| | LDWAMSEGVVAVTSNGNSGPNGWTVGSPGTSREAISVGA |
| | TQLPLNEYAVTFGSYSSAKVMGYNKEDDVKALNNKEVEL |
| | VEAGIGEAKDFEGKDLTGKVAVVKRGSIAFVDKADNAKK |
| | AGAIGMVVYNNLSGEIEANVPGMSVPTIKLSLEDGEKLVS |
| | ALKAGETKTTFKLTVSKALGEQVADFSSRGPVMDTWMIK |
| | PDISAPGVNIVSTIPTHDPDHPYGYGSKQGTSMASPHIAGA |
| | VAVIKQAKPKWSVEQIKAAIMNTAVTLKDSDGEVYPHNA |
| | QGAGSARIMNAIKADSLVSPGSYSYGTFLKENGNETKNET |
| | FTIENQSSIRKSYTLEYSFNGSGISTSGTSRVVIPAHQTGKA |
| | TAKVKVNTKKTKAGTYEGTVIVREGGKTVAKVPTLLIVK |
| | EPDYPRVTSVSVSEGSVQGTYQIETYLPAGAEELAFLVYDS |
| | NLDFAGQAGIYKNQDKGYQYFDWDGTINGGTKLPAGEY |
| | YLLAYAANKGKSSQVLTEEPFTVE |
| Serine Protease 2 native | DDSAPYIGANDAWDLGYTGKGIKVAIIDTGVEYNHPDLKK |
| (truncated) | NFGQYKGYDFVDNDYDPKETPTGDPRGEATDHGTHVAGT |
| Bacillus subtilis | VAANGTIKGVAPDATLLAYRVLGPGGSGTTENVIAGVERA |
| SEQ ID NO: 794 | VQDGADVMNLSLGNSLNNPDWATSTALDWAMSEGVVA |
| | VTSNGNSGPNGWTVGSPGTSREAISVGATQLPLNEYAVTF |
| | GSYSSAKVMGYNKEDDVKALNNKEVELVEAGIGEAKDFE |
| | GKDLTGKVAVVKRGSIAFVDKADNAKKAGAIGMVVYNN |
| | LSGEIEANVPGMSVPTIKLSLEDGEKLVSALKAGETKTTFK |
| | LTVSKALGEQVADFSSRGPVMDTWMIKPDISAPGVNIVSTI |
| | PTHDPDHPYGYGSKQGTSMASPHIAGAVAVIKQAKPKWS |
| | VEQIKAAIMNTAVTLKDSDGEVYPHNAQGAGSARIMNAI |
| | KAD |
| Serine Protease 2 mutant | SSKTSADLEKAEVFGDIDMTTSKKTTVIVELKEKSLAEAKE |
| (Bacillus subtilis subsp. | AGESQSKSKLKTARTQAKNKAIKAVKNGKVNREYEQVFS |
| subtilis str. 168, with | GFSMKLPANEIPKLLAVKDVKAVYPNVTYKTDNMKDKD |
| mutations) | VTISEDAVSPQMDDSAPYIGANDAWDLGYTGKGIKVAIID |
| SEQ ID NO: 795 | TGVEYNHPDLKKNFGQYKGYDFVDNDYDPKETPTGDPRG |
| | EATDHGTHVAGTVAANGTIKGVAPDATLLAYRVLGPGGS |
| | GTTENVIAGVERAVQDGADVMNLSLGNSLNNPDWATSTA |
| | LDWAMSEGVVAVTSNGNSGPNGWTVGSPGTSREAISVGA |
| | TQLPLDEYAVTFGSYSSAKVMGYNKEDDVKALNNKEVEL |
| | VEAGIGEAKDFEGKDLTGKVAVVKRGSIAFVDKADNAKK |
| | AGAIGMVVYNNLSGEIEANVPGMSVPTIKLSLEDGEKLVS |
| | ALKAGETKTTFKLTVSKALGEQVADFSSRGPVMDTWMIK |
| | PDISAPGVNIVSTIPTHDPDHPYGYGSKQGTSMASPHIAGA |
| | VAVIKQAKPKWSVEQIKAAIMNTAVTLKDSDGEVYPHNA |
| | QGAGSARIMNAIKADSLVSPGSCSYGTFLKENGNETKNET |
| | FTIENQSSIRKSYTLEYSFNGSGISTSGTSRVVIPAHQTGKA |
| | TARVKVNTKKTKAGTYEGTVIVREGGKTVAKVPTLLIVKE |
| | PDYPRVTSVSVSEGSVQGTYQIETYLPAGAEELAFLVYDS |
| | NLDFAGQAGIYKNQDKGYQYFDWDGTINGGTKLPAGEY |
| | YLLAYAANKGKSSQVLTEEPFTVE |
| Serine Protease 2 mutant- | DDSAPYIGANDAWDLGYTGKGIKVAIIDTGVEYNHPDLKK |
| truncated | NFGQYKGYDFVDNDYDPKETPTGDPRGEATDHGTHVAGT |
| (Bacillus subtilis subsp. | VAANGTIKGVAPDATLLAYRVLGPGGSGTTENVIAGVERA |
| subtilis str. 168, with | VQDGADVMNLSLGNSLNNPDWATSTALDWAMSEGVVA |
| mutations) | VTSNGNSGPNGWTVGSPGTSREAISVGATQLPLDEYAVTF |
| SEQ ID NO: 796 | GSYSSAKVMGYNKEDDVKALNNKEVELVEAGIGEAKDFE |
| | GKDLTGKVAVVKRGSIAFVDKADNAKKAGAIGMVVYNN |
| | LSGEIEANVPGMSVPTIKLSLEDGEKLVSALKAGETKTTFK |
| | LTVSKALGEQVADFSSRGPVMDTWMIKPDISAPGVNIVSTI |
| | PTHDPDHPYGYGSKQGTSMASPHIAGAVAVIKQAKPKWS |
| | VEQIKAAIMNTAVTLKDSDGEVYPHNAQGAGSARIMNAI |
| | KAD |

[0247] ACC Deaminase

[0248] The composition can comprise at least one ACC deaminase (1-aminocyclopropane-1-carboxylate deaminase) polypeptide. Preferably the composition comprises a polypeptide having ACC deaminase activity.

[0249] As explained in greater detail below, mutations can be made in polypeptides that exhibit D-cysteine desulfhydrase and/or ACC deaminase activity in order to increase the ACC deaminase activity of the polypeptides. All plants make ACC and respond to ethylene, and thus such modified ACC deaminase polypeptides have broad applicability.

[0250] For ease of reference, illustrative D-cysteine desulfhydrase and 1-aminocyclopropane-1-carboxylate deaminase (ACC deaminase) amino acid sequences are provided in Table 18 below, together with their SEQ ID NOs. Mutation of certain amino acids in a wild-type D-cysteine desulfhydrase or ACC deaminase enzyme can result in a polypeptide having increased ACC deaminase activity as compared to the ACC deaminase activity of the wild-type polypeptide (e.g., enzyme) under the same conditions.

[0251] In Table 18, SEQ ID NOs. 723-726 are amino acid sequences for wild-type enzymes that exhibit both ACC deaminase and D-cysteine desulfhydrase activity, and SEQ ID NOs. 727-730 are amino acid sequences for the corresponding versions of these enzymes having two amino acid substitutions relative to the wild-type sequence that result in increased enzyme activity. Thus, SEQ ID NO: 723 is a wild-type sequence and SEQ ID NO: 727 provides the amino acid sequence for the same enzyme having the two amino acid substitutions relative to the wild-type sequence. SEQ ID NOs. 724 and 728, 725 and 729, and 726 and 730 are related to one another in the same manner. The substituted amino acids are shown in SEQ ID NOs. 727-730 in Table 18 in bold and underlined text.

[0252] The compositions described herein can comprise a polypeptide having ACC deaminase activity. Preferably, the polypeptide has an amino acid sequence comprising at least one amino acid substitution relative to the sequence of a wild-type D-cysteine desulfhydrase or ACC deaminase enzyme from a Bacillus genus bacterium. The amino acid sequence of an exemplary ACC deaminase polypeptide that can be used in the compositions and methods herein can comprise SEQ ID NOs 723-730 (Table 18). Preferably, the amino acid sequence of the ACC deaminase polypeptide comprises SEQ ID NO: 730.

TABLE 18
ACC Deaminase Polypeptides

| Enzyme (SEQ ID NO) | Amino acid sequence |
|---|---|
| D-Cysteine Desulfhydrase | MNLAKFPRKKYTESYTPIEKLNNFSEALGGPTIYFKRDDLL |
| (ACC deaminase native 1b) | GLTAGGNKTRKLEFLVADAEAKGADTLITAGGIQSNHCRL |
| Wild-type | TLAAAVKEKMKCILVLEEGLEPEEKPDFNGNYFLYHLLGA |
| Bacillus thuringiensis | ENVIVVPNGADLMEEMHKVAKEVSEKGNTPYVIPVGGSNP |
| (SEQ ID NO: 723) | TGAMGYVACAQEIMAQSFDQGIDFSTVVCVSGSAGMHAG |
| | LITGFAGTQSHIPVIGINVSRGKAEQEEKVAKLVDETSAHV |
| | GIPNFIPRDAVTCFDEYVGPGYALPTPEMVEAVQLLAKTEG |
| | ILLDPVYTGKAVAGLIDLIKKGTFNKEDNILFVHSGGSPAL |
| | YANTSLFA |
| D-Cysteine Desulfhydrase | MNLAKFPRKKYTESYTPIEKLNHFSEVLGGPSIYFKRDDLL |
| (ACC deaminase native 2b) | GLTAGGNKTRKLEFLVADAQAKGVDTLITAGGIQSNHCRL |
| Wild-type | TLAAAVKEKMKCILVLEEGLEPEEKPDFNGNYFLYHLLGA |
| Bacillus pseudomycoides | ENVIVVPNGTDLMDEMQKVAKEVTEKGHTPYVIPVGGSNP |
| (SEQ ID NO: 724) | TGAMGYIACAEEIMAQSFEQGIDFNAVVCVSGSGGMHAGL |
| | ITGFYGRQTGIPIIGMNVSRGKAEQEEKVCKLVQETSAHVG |
| | IPNSIPREAVTCFDEYVGPGYALPTPEMVEAVQLLAKTEGIL |
| | LDPVYTGKAVAGLIDIIRKGTFKKEDNILFVHSGGSPALYA |
| | NTSLFS |
| D-Cysteine Desulfhydrase | MNLAKFPRKKYTESYTPIEKLNNFSEVLGGPTIYFKRDDLL |
| (ACC deaminase native 3b) | GLTAGGNKTRKLEFLVADAQAKGADTLITAGGIQSNHCRL |
| Wild-type | TLAAAVKEKMKCILVLEEGLEPEEKPDFNGNYFLYHLLGA |
| Bacillus thuringiensis | ENVIVVPNGADLMEEMHKVAKEVSEKGNTPYVIPVGGSNP |
| (SEQ ID NO: 725) | TGAMGYVACAQEIMAQSFEQGIDFSSVVCVSGSGGMHAG |
| | LITGFAGTQSHIPVIGINVSRGKAEQEEKVAKLVDETSAHV |
| | GIPNFISRDAVTCFDQYVGPGYALPTQEMVEAVQLLAKTE |
| | GILLDPVYTGKAVAGLIDLIKKGTFNKEDNILFVHSGGSPA |
| | LYANTSLFA |
| D-Cysteine Desulfhydrase | MNLAKFPRKKYTESYTPIEKLNNFSEALGGPTIYFKRDDLL |
| (ACC deaminase) | GLTAGGNKTRKLEFLVADAQEKGADTLITAGGIQSNHCRL |
| Bacillus thuringiensis | TLAAAVKEKMKCILVLEEGLEPEEKRDFNGNYFLYHLLGA |
| Wild-type | ENVIVVPNGADLMEEMNKVAKEVSEKGSTPYVIPVGGSNP |
| (SEQ ID NO: 726) | TGAMGYVACAQEIMAQSFEQGIDFSSVVCVSGSGGMHAG |
| | LITGFSGTQSHIPVIGINVSRGKAEQEEKVAKLVDETSAHVG |
| | IPNFISRDAVTCFDEYVGPGYALPTPEMVEAVQLLAKTEGI |
| | LLDPVYEGKAVAGLIDLIRKGKFNKEDNILFVHLGGSPALY |
| | ANTSLFA |
| D-Cysteine Desulfhydrase | MNLAKFPRKKYTESYTPIEKLNNFSEALGGPTIYFKRDDLL |
| (ACC deaminase native 1b) | GLTAGGNKTRKLEFLVADAEAKGADTLITAGGIQSNHCRL |
| With mutations | TLAAAVKEKMKCILVLEEGLEPEEKPDFNGNYFLYHLLGA |
| Bacillus thuringiensis | ENVIVVPNGADLMEEMHKVAKEVSEKGNTPYVIPVGGSNP |
| (SEQ ID NO: 727) | TGAMGYVACAQEIMAQSFDQGIDFSTVVCVSGSAGMHAG |
| | LITGFAGTQSHIPVIGINVSRGKAEQEEKVAKLVDETSAHV |
| | GIPNFIPRDAVTCFDEYVGPGYALPTPEMVEAVQLLAKTEG |
| | ILLDPVYEGKAVAGLIDLIKKGTFNKEDNILFVHLGGSPAL |
| | YANTSLFA |
| D-Cysteine Desulfhydrase | MNLAKFPRKKYTESYTPIEKLNHFSEVLGGPSIYFKRDDLL |
| (ACC deaminase native 2b) | GLTAGGNKTRKLEFLVADAQAKGVDTLITAGGIQSNHCRL |
| With mutations | TLAAAVKEKMKCILVLEEGLEPEEKPDFNGNYFLYHLLGA |
| Bacillus pseudomycoides | ENVIVVPNGTDLMDEMQKVAKEVTEKGHTPYVIPVGGSNP |
| (SEQ ID NO: 728) | TGAMGYIACAEEIMAQSFEQGIDFNAVVCVSGSGGMHAGL |
| | ITGFYGRQTGIPIIGMNVSRGKAEQEEKVCKLVQETSAHVG |
| | IPNSIPREAVTCFDEYVGPGYALPTPEMVEAVQLLAKTEGIL |
| | LDPVYEGKAVAGLIDIIRKGTFKKEDNILFVHLGGSPALYA |
| | NTSLFS |
| D-Cysteine Desulfhydrase | MNLAKFPRKKYTESYTPIEKLNNFSEVLGGPTIYFKRDDLL |
| (ACC deaminase native 3b) | GLTAGGNKTRKLEFLVADAQAKGADTLITAGGIQSNHCRL |
| With mutations | TLAAAVKEKMKCILVLEEGLEPEEKPDFNGNYFLYHLLGA |
| Bacillus thuringiensis | ENVIVVPNGADLMEEMHKVAKEVSEKGNTPYVIPVGGSNP |
| (SEQ ID NO: 729) | TGAMGYVACAQEIMAQSFEQGIDFSSVVCVSGSGGMHAG |
| | LITGFAGTQSHIPVIGINVSRGKAEQEEKVAKLVDETSAHV |
| | GIPNFISRDAVTCFDQYVGPGYALPTQEMVEAVQLLAKTE |
| | GILLDPVYEGKAVAGLIDLIKKGTFNKEDNILFVHLGGSPA |
| | LYANTSLFA |
| ACC deaminase | MNLAKFPRKKYTESYTPIEKLNNFSEALGGPTIYFKRDDLL |
| (D-Cysteine Desulfhydrase) | GLTAGGNKTRKLEFLVADAQEKGADTLITAGGIQSNHCRL |
| Bacillus thuringiensis, with | TLAAAVKEKMKCILVLEEGLEPEEKRDFNGNYFLYHLLGA |
| mutations) | ENVIVVPNGADLMEEMNKVAKEVSEKGSTPYVIPVGGSNP |
| (SEQ ID NO: 730) | TGAMGYVACAQEIMAQSFEQGIDFSSVVCVSGSGGMHAG |
| | LITGFSGTQSHIPVIGINVSRGKAEQEEKVAKLVDETSAHVG |
| | IPNFISRDAVTCFDEYVGPGYALPTPEMVEAVQLLAKTEGI |
| | LLDPVYEGKAVAGLIDLIRKGKFNKEDNILFVHLGGSPALY |
| | ANTSLFA |

[0253] Glucanase, Amylase and Chitinase Polypeptides

[0254] The composition can comprise a glucanase polypeptide.

[0255] Glucanases use water to break chemical bonds between individual glucose molecules in glucans, which are long chain polysaccharides. Glucans can be broken down into two types, alpha glucan, consisting of primarily alpha chains of glucose molecules, and beta glucans, consisting of primarily beta chains of glucose molecules. Common alpha glucans include dextrans, glycogens, pullalans, and starch. Alpha glucans generally include combinations of alpha 1,4; alpha 1,6, and/or alpha 1,3 glucans and branches. Glucanases that are specific for cleaving alpha linkages are called alpha-glucanases. Beta glucanases are specific to beta linkages between glucans. Common beta glucans include cellulose, laminarin, lichenin, zymosan. Beta glucans are commonly found with b1,3; b1,4, and/or b1,6 linkages between glucose molecules. Glucanases can be either “exo” or “endo” depending on the location of the cleavage of the polysaccharide. Endo-glucanases (particularly β-1,3-D-glucanases) and amylases are particularly effective in the therapeutic and yield promoting compositions described herein.

[0256] The amino acid sequence of illustrative glucanase polypeptides that can be used in the compositions and methods herein can comprise any one of SEQ ID NOs 731-735 or 767-776 as described in Table 19. The glucanase polypeptide can comprise a β-1,3-D-glucanase having an amino acid sequence comprising, for example, any one of SEQ ID NOs: 731-733 or 767-776. For example, the glucanase polypeptide can comprise a β-1,3-D-glucanase having an amino acid sequence comprising SEQ ID NO: 772. For example, the glucanase polypeptide can comprise a β-1,3-D-glucanase having an amino acid sequence comprising SEQ ID NO: 732.

[0257] The composition can comprise an amylase polypeptide.

[0258] Amylases are specific alpha-glucanases that breakdown starch. Amylases are enzymes that hydrolytically cleave α-1,4-glycosidic bonds between individual glucose moieties in the backbone of amylose and amylopectin. Amylose and amylopectin are the components of starch, which are plant-derived storage polysaccharides. Amylose is an unbranched polysaccharide consisting of α-1,4-glycosidic-linked glucose monomers. In the structurally related branched polysaccharide amylopectin several α-1,4-glucan chains are linked to each other by α-1,6-glycosidic bonds.

[0259] The amino acid sequence of illustrative amylase polypeptides that can be used in the compositions and methods herein can comprise SEQ ID NO: 734 or SEQ ID NO: 735.

[0260] The composition can comprise a chitinase polypeptide.

[0261] Chitinases are enzymes that hydrolytically cleave β-1,4-glycosidic bonds between individual N-acetylglucosamine moieties in the backbone of chitin molecules. Chitin is an unbranched structural polysaccharide consisting of β-1,4-glycosidic linked N-acetylglucosamine moieties, which is of high occurrence in the cell walls of many fungi and the exoskeleton of many arthropods.

[0262] The amino acid sequence of illustrative chitinase polypeptides that can be used in the compositions and methods herein can comprise SEQ ID NO: 777 or SEQ ID NO: 778.

[0263] In some instances, the compositions and methods herein comprise two or more glucanase, amylase or chitinase polypeptides (e.g., a β-1,3-glucanase and an amylase or a β-1,3-glucanase and a chitinase). For example, a composition can comprise an amylase having an amino acid sequence comprising at least one of SEQ ID NO: 734 or 735 and a β-1,3-D-glucanase having an amino acid sequence comprising any one of SEQ ID NO: 731-735 or 767-776. As an additional example, a composition can comprise a chitinase having an amino acid sequence comprising at least one of SEQ ID NO: 777 or 778 and a β-1,3-D-glucanase having an amino acid sequence comprising any one of SEQ ID NO: 731-735 or 767-776. In any of these combinations, the β-1,3-D-glucanase can have an amino acid sequence comprising SEQ ID NO: 772. In any of these combinations, the β-1,3-D-glucanase can have an amino acid sequence comprising SEQ ID NO: 732.

TABLE 19
Illustrative Glucanases, Amylases and Chitinases

| SEQ ID NO: | Glucanase Sequences- Amino Acid |
|---|---|
| β-1,3-D-glucanase | GVCYGVIGNNLPSRSDVVQLYRSKGINGMRIYFADGQALS |
| Hordeum vulgare | ALRNSGIGLILDIGNDQLANIAASTSNAASWVQNNVRPYY |
| SEQ ID NO: 731 | PAVNIKYIAAGNEVQGGATQSILPAMRNLNAALSAAGLGA |
| | IKVSTSIRFDEVANSFPPSAGVFKNAYMTDVARLLASTGAP |
| | LLANVYPYFAYRDNPGSISLNYATFQPGTTVRDQNNGLTY |
| | TSLFDAMVDAVYAALEKAGAPAVKVVVSESGWPSAGGF |
| | AASAGNARTYNQGLINHVGGGTPKKREALETYIFAMFNE |
| | NQKTGDATERSFGLFNPDKSPAYNIQF |
| β-1,3-D-glucanase | AETAGTTITSMSYFSTADGPIITKSGVGQASYGFVMPIFNG |
| Paenibacillus spp. | GSATWNDVAQDLGVKVKVNGSWVDIDSVSSFVYNQNWG |
| SEQ ID NO: 732 | HWNDGGFTGYWFTLSATTEIQLYSKANEVTLEYSLVFQNI |
| | NKTTITAMTPTQGPQITAGFTGGAGFTYPIFNHDPAITYAA |
| | VADDLKVYVKPVNSSQWIDIDNNAASGWIYDQNFGQFTD |
| | GGGGYWFNVTESINVKLESKTSSTNIVYTISFNEPVRNSYV |
| | LTPYEGTTFTADASGAIGIPLPKIDGGAPIGTELGNFVYQINI |
| | NGQWVDLDNSSQSGFVYSANGYNNMSAANQWGYWADH |
| | IYGLWFQPIQVDMQIRIGYPLNGQAGGSVGSNFVNYTLIG |
| | NPDAPRPDVNDQEDIPIGTPNDSAIEGMNLIWQDEFNGTAL |
| | DQSKWNYETGYYLNDDPNTWGWGNSELQHYTDRAQNV |
| | FVQDGKLNIKALNEPKSFPQDPSRYAQYSSGKINTKDHFSL |
| | KYGRVDFRAKLPTGNGIWPALWMLPQDNVYGTWASSGEI |
| | DVMEAKGRLPGSTSGAVHFGGQWPTNRYLSGEYHFPEGQ |
| | TFANDYHVYSVVWEEDNIKWYVDGKFFFKVTRDQWYSA |
| | AAPNNPNAPFDQPFYLIMNLAIGGTFDGGRTPDPSDIPATM |
| | QVDYVRVYKEGEGGGQNPGNVPVTGVTVNPTTAQVEVG |
| | QSVQLNASVAPSNATNKQVTWSVSGSSIASVSPNGLVTGL |
| | AQGTTTVTATTADGNKAASATITVAPAPSTVIVIGDEVKG |
| | LKKIGDDLLFYVNGATFADLHYKVNNGGQLNVAMAPTG |
| | NGNYTYPVHNLKHGDTVEYFFTYNPGQGALDTPWQTYV |
| | HGVTQGTPE |
| β-1,3-D-glucanase | AGTTVTSMEYFSPADGPVISKSGVGKASYGFVMPKFNGGS |
| (Bacillus circulans strain | ATWNDVYSDVGVNVKVGNNWVDIDQAGGYIYNQNWGH |
| WL-12) | WSDGGFNGYWFTLSATTEIQLYSKANGVKLEYQLVFQNI |
| SEQ ID NO: 733 | NKTTITAMNPTQGPQITASFTGGAGFTYPTFNNDSAVTYE |
| | AVADDLKVYVKPVNSSSWIDIDNNAASGWIYDHNFGQFT |
| | DGGGGYWFNVTESINVKLESKTSSANLVYTITFNEPTRNS |
| | YVITPYEGTTFTADANGSIGIPLPKIDGGAPIAKELGNFVYQ |
| | ININGQWVDLSNSSQSKFAYSANGYNNMSDANQWGYWA |
| | DYIYGLWFQPIQENMQIRIGYPLNGQAGGNIGNNFVNYTFI |
| | GNPNAPRPDVSDQEDISIGTPTDPAIAGMNLIWQDEFNGTT |
| | LDTSKWNYETGYYLNNDPATWGWGNAELQHYTNSTQNV |
| | YVQDGKLNIKAMNDSKSFPQDPNRYAQYSSGKINTKDKL |
| | SLKYGRVDFRAKLPTGDGVWPALWMLPKDSVYGTWAAS |
| | GEIDVMEARGRLPGSVSGTIHFGGQWPVNQSSGGDYHFPE |
| | GQTFANDYHVYSVVWEEDNIKWYVDGKFFYKVTNQQW |
| | YSTAAPNNPNAPFDEPFYLIMNLAVGGNFDGGRTPNASDI |
| | PATMQVDYVRVYKEQ |
| Amylase (amyE) | ETANKSNELTAPSIKSGTILHAWNWSFNTLKHNMKDIHDA |
| Bacillus subtilis 168 | GYTAIQTSPINQVKEGNQGDKSMSNWYWLYQPTSYQIGN |
| SEQ ID NO: 734 | RYLGTEQEFKEMCAAAEEYGIKVIVDAVINHTTSDYAAIS |
| | NEVKSIPNWTHGNTQIKNWSDRWDVTQNSLLGLYDWNT |
| | QNTQVQSYLKRFLDRALNDGADGFRFDAAKHIELPDDGS |
| | YGSQFWPNITNTSAEFQYGEILQDSASRDAAYANYMDVT |
| | ASNYGHSIRSALKNRNLGVSNISHYASDVSADKLVTWVES |
| | HDTYANDDEESTWMSDDDIRLGWAVIASRSGSTPLFFSRP |
| | EGGGNGVRFPGKSQIGDRGSALFEDQAITAVNRFHNVM |
| | AGQPEELSNPNGNNQIFMNQRGSHGVVLANAGSSSVSINT |
| | ATKLPDGRYDNKAGAGSFQVNDGKLTGTINARSVAVLYP |
| | DDIAKAPHVFLENYKTGVTHSFNDQLTITLRADANTTKAV |
| | YQINNGPETAFKDGDQFTIGKGDPFGKTYTIMLKGTNSDG |
| | VTRTEKYSFVKRDPASAKTIGYQNPNHWSQVNAYIYKHD |
| | GSRVIELTGSWPGKPMTKNADGIYTLTLPADTDTTNAKVI |
| | FNNGSAQVPGQNQPGFDYVLNGLYNDSGLSGSLPH |
| Amylase | MKQQKRLYARLLPLLFALIFLLPHSATAAANLNGTLMQYF |
| Bacillus licheniformis | EWYMPNDGQHWKRLQNDSAYLAEHGITAVWIPPAYKGT |
| SEQ ID NO: 735 | SQDDVGYGAYDLYDLGEFHQKGTVRTKYGTKGELQSAIN |
| | SLHSRGINVYGDVVINHKGGADATEDVTAVEVDPADRNR |
| | VTSGEQRIKAWTHFQFPGRGSTYSDFKWHWYHFDGTDW |
| | DESRKLNRIYKFQGKAWDWEVSNENGNYDYLMYADIDY |
| | DHPDVTAEIKRWGTWYANELQLDGFRLDAVKHIKFSFLR |
| | DWVNHVREKTGKEMFTVAEYWQNDLGALENYLNKTNF |
| | NHSVFDVPLHYQFHAASTQGGGYDMRKLLNGTVVSKHP |
| | VKAVTFVDNHDTQPGQSLESTVQTWFKPLAYAFILTREAG |
| | YPQIFYGDMYGTKGASQREIPALKHKIEPILKARIQYAYGA |
| | QHDYFDHHDIVGWTREGDSSVANSGLAALITDGPGGTKR |
| | MYVGRQNAGETWHDITGNRSDSVVINAEGWGEFHVNGG |
| | SVSIYVQR |
| β-1,3-D-glucanase | AGWAAPAASSGAGAIQASSEEPGISADQAGAGAAFKDIQG |
| (LamA1) | TWASRQVGKWAGLGLVNGSGGQFRPGDTVSRAEFAKLV |
| Paenibacillus sp. | NALFGFTAKTGGTLGDVAPGKWYAEQVAIALQAGYMEG |
| CCRC17245 | YPGGLFKPEAAVTRQEAAKIAALLFPLATADSAAVLSGFK |
| SEQ ID NO: 767 | DRTAIGGFAVQPLADLVSAGALKGFADGTLRPQQPLTRAE |
| | AVVLLDRLAGEIIRQPGSYDGVKSDSGLLIASADTILKQAE |
| | VKGNVLITAGVGEGEVTLDGLSADGTLYVNGGGSHSVHL |
| | RNAKVGKVVVNKSGGPVRVVLEGSSKVGEMSLETGAVV |
| | EVGEQAEVASLQVEQSAGGTELNVKGTVGELQTQASGVT |
| | LNGETFEQGKVLEVQQGKAADKTEPQNGNAPAGGTSGGG |
| | AASPGNGGGSGGGGNGGGGTAGENLAAPVLTPDPVNNVL |
| | GRDVALTFADNPAWRNAISEITLNGRKLTLTADYLLSAGS |
| | LTLKASVFAETGDHTLIIKAAGYTDVSVTQPMGKWELVW |
| | GDEFDGSGTHVDANGVNLDKWGYQNGTGAEYGLDGWG |
| | NNEQQYYTKDNLKVQDGKLTITAKKQPLGGKPYTSGRLW |
| | TSPTFTKQYGRFEASIKLPEGEGLWPAFWMMPKDSKYGV |
| | WASSGELDIMEVRGRLPEESSGTIHYGKPWPNNKSTGTDY |
| | HFPAGQSISSGFHTYAVEWEPGEIRWYVDGNLFQKVDEW |
| | SSEGAGQPDKYAFPAPFDQPFYIILNLAVGGNFDGNRLPPD |
| | SKLPAEMQVDYVRAYELDGKPYKTPVEPVLAKEPIPAEAR |
| | QPVDGSYIADSNFEQGLTDIPVSSQPLSADKWNFLHTPDY |
| | GGAGSASIEQIENRNFAKIVPTSAGNQNYSLQMIQYAPLVR |
| | GHVYKLSFDAKSDAERSIAVKMGGDGDNGWAAYSDNFD |
| | VKLQASLQHYEYRFVMGAQTDLTARLEFNAGLNTHPVWI |
| | GHVRLEETDQVTDPDGAKTPLEDGNHIYNGTFDLGTMDR |
| | MKYWHFVTEAPDGGADASASVDPDARELAVDIRSGGSHP |
| | QAVRLLQKGINLLQNDTYELTFEAKAGSPRSIGVTLLSKD |
| | GSTIYGKAEGLAVGTTAEQQTVTFTMPVQVSDPEGQLVFE |
| | LGGGQAGKAALTLDNIRLIRTTNNNVDYSKVSLYPLVNGD |
| | FSAGLSGWEPFTQGAAANFSAADGIAKVSVSNVGTEAWNI |
| | MFNQSNLNLTKGFTYVLAFDAKSSAARDTEVTLEDAAYN |
| | RRFDSGFISLGTDWQHYEYTVKAAADDNVALKLLLGKTP |
| | QAPNGAHDVSFRNVVLEVKDAPLQRPPALAADATDNRYG |
| | QPVQIGFKDNEAWRTAISSILVNDRVLEAGAYEIQPGALIL |
| | LAPSFSSEGTYRITVKAAGYADTSVTQVLIAGDGNLLVNG |
| | GFDQEKTAWELWVANEGDTTFDVKDGAAELNIHYYGGL |
| | DPQWGVPFSWYTQLMQSGVKVEAGKTYELSFRAWSSVD |
| | RPILVELTGYNNNQQLPFSITGDSQEVYTAVLKPSANAVFT |
| | LKYLLGNVITDGLTTPDAEHQLHLDDIKLTEVKGGPQLTA |
| | DTTENQAGHEIELTFPDDPDWRGAISGVLINGTAAGMDKV |
| | AAGPGSLKLEASLFPSPGSYTISILAQGYAGNTVSQLILSAS |
| | PNVALGKTATASTSVQSASGAVDGNANTRWESDFNDPQ |
| | WLSVDLGGLYRIDSVLLNWEGAYGKTYQVQISQAEQPGE |
| | NDWTDWYTEAAGNGGQDLVFAAPAEARHVRILGTARAT |
| | QYGYSLWEMEVYGTPAEDQTAAGEDVNP |
| β-1,3-D-glucanase - | TQPMGKWELVWGDEFDGSGTHVDANGVNLDKWGYQNG |
| functional domain | TGAEYGLDGWGNNEQQYYTKDNLKVQDGKLTITAKKQP |
| (LamA1) | LGGKPYTSGRLWTSPTFTKQYGRFEASIKLPEGEGLWPAF |
| Paenibacillus sp. | WMMPKDSKYGVWASSGELDIMEVRGRLPEESSGTIHYGK |
| CCRC17245 | PWPNNKSTGTDYHFPAGQSISSGFHTYAVEWEPGEIRWYV |
| SEQ ID NO: 768 | DGNLFQKVDEWSSEGAGQPDKYAFPAPFDQPFYIILNLAV |
| | GGNFDGNRLPPDSKLPAEMQVDYVRAYELDGKPYKTPVE |
| | PVLAKEPIPAEA |
| β-1,3-D-glucanase | QIGVCYGMLGDTLPSPSDVVALYKQQNIQRMRLYGPDPG |
| (AtPr2) | ALAALRGSDIELILDVPSSDLERLASSQTEADKWVQENVQ |
| Arabidopsis thaliana | SYRDGVRFRYINVGNEVKPSVGGFLLQAMQNIENAVSGA |
| SEQ ID NO: 769 | GLEVKVSTAIATDTTTDTSPPSQGRFRDEYKSFLEPVIGFLA |
| | SKQSPLLVNLYPYFSYMGDTANIHLDYALFTAQSTVDNDP |
| | GYSYQNLFDANLDSVYAALEKSGGGSLEIVVSETGWPTEG |
| | AVGTSVENAKTYVNNLIQHVKNGSPRRPGKAIETYIFAMF |
| | DENKKEPTYEKFWGLFHPDRQSKYEVNFN |
| β-1,3-D-glucanase | QIGVCYGMKAKILPSKRDVVALYNQNNIRRMRLYDPNIEA |
| (CsPr2) | LEALRGSNIEVMLGLPNENLQRIASNQAEANTWVQNNVR |
| Citrus sinensis | NFANNVKFKYIAVGNEAKPGDNFAQYLVPAMRNIQNAIN |
| SEQ ID NO: 770 | GAGLGNQIKVSTAIETGALGESFPPSRGSFKQDYRPILDPLI |
| | RFLNENRSPLLLNLYPYFAIAGNRQISLDYALFRSQQTVVS |
| | DGSLSYRSLFDAILDAVYAALEKTGGGSLDIVISESGWPTA |
| | GGDGALTNVDNARTYNNNLIQHVKRGSPKRPGRPIETYIF |
| | AMFDENGKMGPEIERHWGLFAPNRQPKYQINFN |
| β-1,3-D-glucanase | SAPAPPSGWSQVFLDDFDGAAGSSVNTANWQFDTGTSYP |
| (Curd) | GGAGNWGTGEVESMTSSTSNVSLDGNGDLLITPRRDASG |
| Streptomyces sioyaensis | NWTSGRIETTRTDFQPPAGGKLRVEARLQMPNVTGDAAA |
| SEQ ID NO: 771 | GYWPAFWMLGAPFRGNYQNWPGVGELDIMENVQGLNKT |
| | WATMHCGTSPGGPCNETSGIGNLTACPNTTCHSGLHTYT |
| | MEWDRSVSPEAIRFSVDGVTYQTVTANHMDAVTWTNAT |
| | NHGFFVILNVAMGGGFPGAFGGGPTGATEPGHPMVVDYV |
| | QVLQSSGGGGGGGGGTTPPPTGDRDAYGQIQAESYDGQS |
| | GVATETTTDTGGGQDMGYLANGDWALYKGVNFGSTPAT |
| | QFYGRVASGAGGGVSGLVEVRLDSRTNAPIGSFAVGDTG |
| | GWQSWRTVPANIGSVTGTHDVYLTFSSGQPADFVNVNWF |
| | DFGH |
| β-1,3-D-glucanase | APGDLLWSDEFDGAAGSAPNPAVWNHETGAHGWGNAEL |
| (DK-1) | QNYTASRANSALDGQGNLVITARREGDGSYTSARMTTQG |
| Cellulosimicrobium | KYQPQYGRIEARIQIPRGQGIWPAFWMLGGSFPGTPWPSS |
| cellulans strain .DK-1 | GEIDIMENVGFEPHRVHGTVHGPGYSGGSGITGMYQHPQG |
| SEQ ID NO: 772 | WSFADTFHTFAVDWKPGEITWFVDGQQFHRVTRASVGAN |
| | AWVFDQPFFLILNVAVGGQWPGYPDGTTQLPQQMKVDY |
| | VRVYDNGSGSSNPGNPGTGLPTGTGAVRAANGMCIDVPW |
| | ADPTDGNPVQIVTCSGNAAQTWTRGSDGTVRALGKCLDV |
| | RDGSTTRGAAVQVWTCNGTGAQKWAYDAGSKALRNPQS |
| | GLCLDATGGAPLHDGQRLQTWTCNGTTAQQWTL |
| β-1,3-D-glucanase | ATTPLAAAPVAAGNWGDDFDGPAGAAVDPAKWTLETGG |
| (QLK1) | SGNGNHELQYYTAGAANAALDGQGHLVITAKRNTDPGLS |
| Kitasatospora phosalacinea | CWYGTCQYTSARLNTSRTFTQAYGHFESRIKIPRGQGIWP |
| strain SYBCQL | AFWMLGNDLGTAGWPNSGEIDVMENIGREPGTVHGTIHG |
| SEQ ID NO: 773 | PGYSGAGGIGAPYSLPAGQSFADAFHTFAVDWSPTAITWS |
| | VDGTAYQTRTPADLGGNRWVFDHPFFVILNLAVGGDWPG |
| | SPDGSSTYPQTMTVDYVHTTTWGGSTGGSYTGQITGPGG |
| | MCMDVAGASSADSTPIQLHNCTGNAAQQWTVGADGTVR |
| | ALGKCLDVAAASHNDGAAIQLYTCNGTSAQQWTHRSGN |
| | DLLNPGSGKCLDSPNGSSADGTHLQLWTCNGTGAQKWTL |
| | G |
| β-1,3-D-glucanase | RTAAPEQARTAAGAAAAVSTFSDTFDGPAGAAVDSSKWT |
| (17-W) | LETGDNVNNHERQYYTSGTKNAALDGQGHLVITARKENP |
| Streptomyces sp. SYBC17 | AGYQCWYGSCQYTSARLNTAGKFNAQYGHVEARMKIPR |
| SEQ ID NO: 774 | GQGMWPAFWMLGTPVNWPDSGEIDVMENVGFEPSTVHG |
| | TIHGPGYSGSGGIGAAYSLPNGQAFADAFHTFAVDWAPDS |
| | ITWSVDGNVYQRRTPADLGGKSWVFNKPFFLILNLAVGG |
| | YWPGDPDGSTQFPQTLVVDSVSVTTSGGGAGVPIRGLAGK |
| | CVDVAGANSANGTPVQLYDCNGTGAQAWTAGSDGTLRA |
| | LGKCLDVSGGGTADGTPVQLWDCNGSPAQQWALPAARD |
| | IVNPQANKCLDVTGNNAANGTRLQIWTCTGGANQKWTV |
| | G |
| β-1,3-D-glucanase | AGPAGETAGRTVQKAAQGAEAAPAAVLFEENFDGPAGSA |
| (Bgls27) | VDSRRWQLETGDNSGNNHERQYYTPGNANAALDGNGNL |
| Streptomyces sp. S27 | VITARKENPGNYQCWYGRCEYTSARMNTAGKFTTTYGHI |
| SEQ ID NO: 775 | EARMKLPRGQGMWPAFWMLGHDIGSVGWTNSGEIDIME |
| | NVGYEPGTVHGTLHGPGYSGGEGIGAGYTLPGGRAFADD |
| | FHTFAVDWSPNSITWSVDGQVYQRRTPADLGGDRWVFDK |
| | PFFLILNLAVGGDWPGLPDSSTVFPQKLVVDYVRVTSGGD |
| | SGGGGGGRTGTITGLAGKCLDVAWADTANGTPVQIHDCN |
| | GNAAQQWTVGTDGTIRALGKCLDVSGAGKADGTPVQIW |
| | DCNGTAAQQWVVTGARDIVNPNADKCLDVRDNNSANGT |
| | KTQIWTCSGTANQKWNTP |
| β-1,3-D-glucanase | APNWNLVWSDEFNGTSLNRANWTPEIGTGSGGWGNNEL |
| (BglM) | QYYTDRAQNVQVTGGNLVITAQKESYGGMNYTSARIKTQ |
| Paenibacillus sp IAM1165 | DLKSFTYGKVEARIKLPSGQGLWPAFWMLGSNISSVGWP |
| SEQ ID NO: 776 | KSGEIDIMERVNNNPYVNGTVHWDAGGHADFGRVSGNL |
| | DFSQFHVYSIEWDSKYIRWFVDGQQFNEFYIENGTGNTEE |
| | FQRPFFILLNLAVGGNWPGSPNNSTPFPSQMLVDYVRVYQ |
| | DTGASNVISDGIYTIASKASGKVMDVVDVSTARGAKIQQW |
| | TNYVANNQRFRVESTGDGYYKLTAVHSGKVLDVPSSSTS |
| | TGVQLQQWDDNGSNAQRWKIVDVGGGYYKLVSKVSGLA |
| | VDVASASTADGAVVQQWTDNGTDAQKWLFTKIN |
| Endochitinase | DSPKQSQKIVGYFPSWGVYGRNYQVADIDASKLTHLNYA |
| (ChiC) | FADICWKGKHGNPSTHPDNPNKQTWNCKESGVPLQNKEV |
| Bacillus thuringiensis (E0) | PNGTLVLGEPWADVTKSYPGSGTTWEDCDKYARCGNFGE |
| SEQ ID NO: 777 | LKRLKAKYPHLKTIISVGGWTWSNRFSDMAADEKTRKVF |
| | AESTVAFLRAYGFDGVDLDWEYPGVETIPGGSYRPEDKQ |
| | NFTLLLQDVRNALNKAGAEDGKQYLLTIASGASQRYADH |
| | TELKKISQILDWINIMTYDFHGGWEATSNHNAALYKDPND |
| | PAANTNFYVDGAIDVYTNEGVPVDKLVLGVPFYGRGWKS |
| | CGKENNGQYQPCKPGSDGKLASKGTWDDYSTGDTGVYD |
| | YGDLTANYVNKNGFVRYWNDTAKVPYLYNATTGTFISYD |
| | DNESMKYKTDYIKTKGLSGAMFWELSGDCRTSPKYSCSG |
| | PKLLDTLVKELLGGPINQKDTEPPTNVKNIIVTNKTSSSVQ |
| | LSWTASTDNVGVTEYEITAGEEKWSATTNSITIKNLKPNTE |
| | YTFSVIAKDASGNKSHPTALTVKTDEANTTPPDGNGTATF |
| | SVTSNWGSGYNFSIIIKNNGTIPIKNWKLEFDYSGNLTQVW |
| | DSKISSKTNNHYVITNAGWNGEIPPGGSITIGGAGTGNPAE |
| | LLNAVISEN |
| Chitinase | MSTRKAVIGYYFIPTNQINNYTETDTSVVPFPVSNITPAKA |
| (ChiB) | KQLTHINFSFLDINSNLECAWDPATNDAKARDVVNRLTAL |
| Serratia marcescens | KAHNPSLRIMFSIGGWYYSNDLGVSHANYVNAVKTPASR |
| SEQ ID NO : 778 | AKFAQSCVRIMKDYGFDGVDIDWEYPQAAEVDGFTAALQ |
| | EIRTLLNQQTVADGRQALPYQLTIAGAGGAFFLSRYYSKL |
| | AQIVAPLDYINLMTYDLAGPWEKVTNHQAALFGDAAGPT |
| | FYNALREANLGWSWEELTRAFPSPFSLTVDAAVQQHLMM |
| | EGVPSAKIVMGVPFYGRAFKGVSGGNGGQYSSHSTPGEDP |
| | YPSTDYWLVGCEECVRDKDPRIASYRQLEQMLQGNYGYQ |
| | RLWNDKTKTPYLYHAQNGLFVTYDDAESFKYKAKYIKQQ |
| | QLGGVMFWHLGQDNRNGDLLAALDRYFNAADYDDSQL |
| | DMGTGLRYTGVGPGNLPIMTAPAYVPGTTYAQGALVSYQ |
| | GYVWQTKWGYITSAPGSDSAWLKVGRVA |

[0264] The native amino acid sequence of the glucanase of SEQ ID NO: 767 includes the signal peptide MTLSSGKSNRFRRRFAAVLFGTVLLAGQIPA (SEQ ID NO: 779) at the amino-terminus of the sequence, immediately preceding the first amino acid of SEQ ID NO: 767. This signal peptide is not included in SEQ ID NO: 767. However, the signal peptide of SEQ ID NO: 779, or another signal peptide, can optionally be included at the amino terminus of the glucanase of SEQ ID NO: 767, at the amino terminus of the truncated glucanase of SEQ ID NO: 768, or at the amino-terminus of any of the other peptides described herein.

[0265] The native amino acid sequence of the glucanase of SEQ ID NO: 769 includes the signal peptide MSESRSLASPPMLMILLSLVIASFFNHTAG (SEQ ID NO: 780) at the amino-terminus of the sequence, immediately preceding the first amino acid of SEQ ID NO: 769. This signal peptide is not included in SEQ ID NO: 769. However, the signal peptide of SEQ ID NO: 780, or another signal peptide, can optionally be included at the amino terminus of the glucanase of SEQ ID NO: 769, or at the amino-terminus of any of the other peptides described herein.

[0266] The native amino acid sequence of the glucanase of SEQ ID NO: 770 includes the signal peptide MAKFFSSPNTSSTAPVVLFVVGLLMATLHTASA (SEQ ID NO: 781) at the amino-terminus of the sequence, immediately preceding the first amino acid of SEQ ID NO: 770. This signal peptide is not included in SEQ ID NO: 770. However, the signal peptide of SEQ ID NO: 781, or another signal peptide, can optionally be included at the amino terminus of the glucanase of SEQ ID NO: 770, or at the amino-terminus of any of the other peptides described herein.

[0267] The native amino acid sequence of the glucanase of SEQ ID NO: 771 includes the signal peptide MSDSSGTPRPRSHSRPRSRSVRRALMAAVATFGLAAAVATAATGPADA (SEQ ID NO: 782) at the amino-terminus of the sequence, immediately preceding the first amino acid of SEQ ID NO: 771. This signal peptide is not included in SEQ ID NO: 771. However, the signal peptide of SEQ ID NO: 782, or another signal peptide, can optionally be included at the amino terminus of the glucanase of SEQ ID NO: 771, or at the amino-terminus of any of the other peptides described herein.

[0268] The native amino acid sequence of the glucanase of SEQ ID NO: 772 includes the signal peptide MDLARHRSLTPPTTPPGTSVGPRPRARRRLAGALVAALTAAAAALAVTV PATSAAA (SEQ ID NO: 783) at the amino-terminus of the sequence, immediately preceding the first amino acid of SEQ ID NO: 772. This signal peptide is not included in SEQ ID NO: 772. However, the signal peptide of SEQ ID NO: 783, or another signal peptide, can optionally be included at the amino terminus of the glucanase of SEQ ID NO: 772, or at the amino-terminus of any of the other peptides described herein.

[0269] The native amino acid sequence of the glucanase of SEQ ID NO: 773 includes the signal peptide MAAAPRTRRWSLGGFVLLVATALVAAAPFGSAPTGSA (SEQ ID NO: 784) at the amino-terminus of the sequence, immediately preceding the first amino acid of SEQ ID NO: 773. This signal peptide is not included in SEQ ID NO: 773. However, the signal peptide of SEQ ID NO: 784, or another signal peptide, can optionally be included at the amino terminus of the glucanase of SEQ ID NO: 773, or at the amino-terminus of any of the other peptides described herein.

[0270] The native amino acid sequence of the glucanase of SEQ ID NO: 774 includes the signal peptide MASPRLLRRCLFAALSAALVGSVAVGPAQA (SEQ ID NO: 785) at the amino-terminus of the sequence, immediately preceding the first amino acid of SEQ ID NO: 774. This signal peptide is not included in SEQ ID NO: 774. However, the signal peptide of SEQ ID NO: 785, or another signal peptide, can optionally be included at the amino terminus of the glucanase of SEQ ID NO: 774, or at the amino-terminus of any of the other peptides described herein.

[0271] The native amino acid sequence of the glucanase of SEQ ID NO: 775 includes the signal peptide MVMHPTTPHTPHDPPRGKPARRRRSRRWASAATLLTLAVTMAVTGTAA (SEQ ID NO: 786) at the amino-terminus of the sequence, immediately preceding the first amino acid of SEQ ID NO: 775. This signal peptide is not included in SEQ ID NO: 775. However, the signal peptide of SEQ ID NO: 786, or another signal peptide, can optionally be included at the amino terminus of the glucanase of SEQ ID NO: 775, or at the amino-terminus of any of the other peptides described herein.

[0272] The native amino acid sequence of the glucanase of SEQ ID NO: 776 includes the signal peptide MMLRKGICVVILFSLLVVLLPVNKTNA (SEQ ID NO: 787) at the amino-terminus of the sequence, immediately preceding the first amino acid of SEQ ID NO: 776. This signal peptide is not included in SEQ ID NO: 776. However, the signal peptide of SEQ ID NO: 787, or another signal peptide, can optionally be included at the amino terminus of the glucanase of SEQ ID NO: 776, or at the amino-terminus of any of the other peptides described herein.

### Isolated Polypeptides—Glucanases/Amylases and Chitinases

[0273] The glucanases, amylases and chitinases described in Table 19 can also be provided as isolated polypeptides. Accordingly, an isolated polypeptide is provided wherein the polypeptide has an amino acid sequence comprising or consisting of any one of SEQ ID NOs: 732, 735, and 767-778.

[0274] The isolated polypeptide can have an amino acid sequence comprising or consisting of any one of SEQ ID NOs: 732, 767-776 and 778.

[0275] The isolated polypeptide can have an amino acid sequence comprising or consisting of any one of SEQ ID NOs: 767-769, 771-773, 775, and 778.

[0276] The isolated polypeptide can have an amino acid sequence comprising or consisting of any one of SEQ ID NOs: 767-769, 772-773, 775, and 778.

[0277] The isolated polypeptide can have an amino acid sequence comprising or consisting of SEQ ID NO: 772.

### Additional Modifications

[0278] Any bioactive priming polypeptide, whether naturally occurring or non-natural and whether provided as an isolated polypeptide or in a composition, can be further modified via chemical modification to increase performance as well as stability of the polypeptides. Such bioactive priming polypeptides include flagellin polypeptides, retro inverso polypeptides, thionin polypeptides, RHPP polypeptides, serine protease polypeptides, ACC deaminase polypeptides, glucanase polypeptides, chitinase polypeptides, and amylase polypeptides. Specific sequences that can be chemically modified include SEQ ID NOs: 1-610, 620-719, 721-735, and 745-778. Chemically modified sequences can be provided in the compositions described herein. Further, when the chemically modified sequence comprises or consists of any one of SEQ ID NOs 732, 735 and 745-778, the chemically modified polypeptide can be provided as an isolated polypeptide.

[0279] These bioactive priming polypeptides can also be conjugated to other moieties, including a plant binding domain and a polypeptide, and other carriers such as oils, plastics, beads, ceramic, soil, fertilizers, pellets, and most structural materials.

[0280] In addition, polypeptides can be chemically synthesized with D-amino acids, β2-amino acids, β3-amino acids, homo amino acids, gamma amino acids, peptoids, N-methyl amino acids, and other non-natural amino acid mimics and derivatives.

[0281] The polypeptides can be modified by either natural processes, such as posttranslational processing, or by chemical modification techniques that are well known in the art. Modifications can occur anywhere in a polypeptide, including the polypeptide backbone, the amino acid side-chains and the amino or carboxyl termini. The same type of modification can be present in the same or varying degrees at several sites in a polypeptide. Also, a polypeptide can contain many types of modifications.

[0282] Peptides can be branched, for example, as a result of ubiquitination, and they can be cyclic, with or without branching. Cyclic, branched, and branched cyclic polypeptides can result from posttranslational natural processes or may be made by synthetic methods.

[0283] Modifications include acetylation, acid addition, acylation, ADP-ribosylation, aldehyde addition, alkylamide addition, amidation, amination, biotinylation, carbamate addition, chloromethyl ketone addition, covalent attachment of a nucleotide or nucleotide derivative, cross-linking, cyclization, disulfide bond formation, demethylation, ester addition, formation of covalent cross-links, formation of cysteine-cysteine disulfide bonds, formation of pyroglutamate, formylation, gamma-carboxylation, glycosylation, GPI anchor formation, hydrazide addition, hydroxyamic acid addition, hydroxylation, iodination, lipid addition, methylation, myristoylation, oxidation, PEGylation, proteolytic processing, phosphorylation, prenylation, palmitoylation, addition of a purification tag, pyroglutamyl addition, racemization, selenoylation, sulfonamide addition, sulfation, transfer-RNA mediated addition of amino acids to proteins such as arginylation, ubiquitination, and urea addition. (see, e.g., Creighton et al. (1993) Proteins—Structure and Molecular Properties, 2nd Ed., T. E. Creighton, W. H. Freeman and Company, New York; Johnson, ed. (1983) Posttranslational Covalent Modification Of Proteins, Academic Press, New York; Seifter et al. (1990) Meth. Enzymol., 182: 626-646; Rattan et. al. (1992) Ann. N.Y. Acad. Sci., 663: 48-62; and the like).

[0284] Using known methods of protein engineering and recombinant DNA technology, variants can be generated to improve or alter the characteristics of the polypeptides described herein. Such variants include deletions, insertions, inversions, repeats, duplications, extensions, and substitutions (e.g., conservative substitutions) selected according to general rules well known in the art so as have little effect on activity.

[0285] The polypeptide can comprise an amino acid sequence having at least 70% identity to any one of SEQ ID NOs. 1-735, 745-787, and 794-797 wherein the polypeptide has bioactive priming activity.

[0286] The polypeptide can comprise an amino acid sequence having at least 75% identity to any one of SEQ ID NOs. 1-735, 745-787, and 794-797 wherein the polypeptide has bioactive priming activity.

[0287] The polypeptide can comprise an amino acid sequence having at least 80% identity to any one of SEQ ID NOs. 1-735, 745-787, and 794-797 wherein the polypeptide has bioactive priming activity.

[0288] The polypeptide can comprise an amino acid sequence having at least 85% identity to any one of SEQ ID NOs. 1-735, 745-787, and 794-797 wherein the polypeptide has bioactive priming activity.

[0289] The polypeptide can comprise an amino acid sequence having at least 90% identity to any one of SEQ ID NOs. 1-735, 745-787, and 794-797 wherein the polypeptide has bioactive priming activity.

[0290] The polypeptide can comprise an amino acid sequence having at least 95% identity to any one of SEQ ID NOs. 1-735, 745-787, and 794-797 wherein the polypeptide has bioactive priming activity.

[0291] The polypeptide can comprise an amino acid sequence having at least 98% identity to any one of SEQ ID NOs. 1-735, 745-787, and 794-797 wherein the polypeptide has bioactive priming activity.

[0292] The polypeptide can comprise an amino acid sequence having at least 99% identity to any one of SEQ ID NOs. 1-735, 745-787, and 794-797 wherein the polypeptide has bioactive priming activity.

b. Preparation of Bioactive Priming Polypeptides

[0293] Methods and approaches are provided for cloning, genetically modifying and expressing the bioactive priming polypeptides (for example, flagellins) and the bioactive priming polypeptides (for example, Bt.4Q7Flg22) using those methods well understood and commonly used by one of ordinary skill in the art. The methods described herein can be used with any of the bioactive priming polypeptides as described herein and therefore include any of the flagellins, flagellin-associated polypeptides, thionins, RHPP, serine proteases, ACC deaminases, glucanases and/or any combinations thereof.

[0294] Bioactive priming polypeptides can be provided as part of a fusion protein, as a free polypeptide, immobilized on the surface of a particle, or impregnated on or into a matrix. Several expression systems can be used for the production of free polypeptide.

[0295] The flagellin-derived full-coding, partial coding (flagellin polypeptides) and flagellin-associated polypeptides can be overexpressed in Bacillus strain, for example, Bacillus thuringiensis strain BT013A, in Bacillus cereus or in Bacillus subtilis. The flagellins and flagellin-derived polypeptides are cloned using an appropriate expression vector to allow for the abundant production of the polypeptide. However, when an expression system such as a Bacillus strain is used, preferably, the peptides are not bound to an exosporium of a Bacillus cereus family member or an intact Bacillus cereus family member spore (i.e., the polypeptides are provided as “free polypeptides.”

[0296] For example, in order to facilitate cloning of the target nucleotides that encode the bioactive priming polypeptide(s) as described herein, an E. coli compatible shuttle vector pSUPER was constructed by fusing the pBC plasmid backbone described above with the E. coli pUC57 cloning vector at compatible BamHI restriction endonuclease sites. The resulting, pSUPER vector carries dual selection markers (ampicillin selection in E. coli and tetracycline selection in Bacillus spp). Cloning was performed by PCR amplification of target nucleotides with specific primers synthesized with 15 bp overlapping the pSUPER insertion site. Specific gene encoding polypeptides were fused to the pSUPER vector with In-Fusion HD Cloning Kit (Clontech). Sequence verified pSUPER constructs were amplified using the pBC suitable backbone Reverse and Forward primers. The resulting PCR products were self-ligated to generate the pBC plasmid that was used to transform the donor Bacillus spp. strain. The final construct was verified to be completely intrageneric by Sanger sequencing.

[0297] The bioactive priming polypeptides/peptides as described herein are produced in large amounts for field and grower applications by using a free expression system that can utilize a Bacillus subtilis and/or Bacillus thuringiensis strain as the designated heterologous expression strain. The base expression plasmid designated pFEe4B consists of an E. coli section (=e) and a Bacillus section (=pFE). The e section was derived from pUC19 and enables selection and amplification of the vector in E. coli for cloning purposes. It comprises the beta-lactamase gene (bla) conferring resistance to beta-lactam antibiotics such as ampicillin and other penicillin derivatives, as well as an E. coli origin of replication allowing vector multiplication. The pFE section provides selection and plasmid amplification in Bacillus spp. and drives expression of the heterologous polypeptide/peptide of interest. As such it contains a gene conferring resistance to tetracycline (tetL), as well as the gene for a replication protein (repU) responsible for amplifying the plasmid in Bacillus spp., both of which were derived from the native Bacillus cereus plasmid pBC16. The expression cassette of pFEe4B contains a secretion signal (amyQ, SEQ ID NO: 736, Table 20), a cloning site and a terminator (rspD), the former resulting in secretion of the expressed protein/peptide from the host strain cells into the surrounding medium, and the latter preventing transcription beyond the open reading frame of interest. Expression in pFEe4B is driven by a modified autoinducible promoter, which initiates expression once the culture reaches a sufficient optical density. In the pFEe4b expression system, expression is controlled by an IPTG-inducible promoter sequence from Bacillus subtilis. This promoter consists of a modified constitutive promoter combined with the E. coli lac repressor (lacI) and a ribosome binding site. Thus, expression from pFEe4B-encoded polypeptides/peptides depends on the presence of suitable induction agents such as isopropyl beta-D-1-thiogalactopyranoside (IPTG). However other pFe systems useful for expression of the polypeptides as described herein do not rely on such induction systems for their expression. The pFEe4 plasmid further harbors the E. coli lad gene under control of the Bacillus licheniformis penicillinase promoter to prevent expression of polypeptide/peptide as described herein in absence of any induction agent.

[0298] Other commercially available expression vectors, for example, any of those derived from Bacillus subtilis, can also be useful. Other expression vectors were selected for producing the recombinant bioactive priming polypeptides due to the following desired criteria: the recombinant microorganism is non-pathogenic and is considered as generally regarded as safe (GRAS) organisms, it has no significant bias in codon usage and it is capable of secreting extracellular proteins directly into the culture medium providing for a cell free version(s) of the bioactive priming polypeptides.

[0299] One exemplary system of producing Bt.4QFlg22, Bt.Flg22Syn01, and thionins using fermentation is provided. The polypeptides can be provided in a confirmation to stabilize the polypeptide and enhance activity for an alternative production method, namely bacterial fermentation. The polypeptide (e.g., a polypeptide having an amino acid sequence comprising any one of SEQ ID NOs: 226, 571, or 620) can be combined with an amyQ secretion signal from Bacillus amyloliquefaciens alpha-amylase) fused to glutathione S-transferase (GST, Schistosoma japonicum) and an enterokinase cleavage tag sequence as described in Table 20.

TABLE 20
Sequences useful for increasing stability of an expressed flagellin or flagellin-
associated polypeptide.

| | |
|---|---|
| amyQ secretion signal | MIQKRKRTVSFRLVLMCTLLEVSLPITKTSA |
| (Bacillus amyloliquefaciens) | |
| SEQ ID NO: 736 | |
| GST | MSPILGYWKIKGLVQPTRLLLEYLEEKYEEHLYERDEGDKWRN |
| (Schistosoma japonicum) | KKFELGLEFPNLPYYIDGDVKLTQSMAIIRYIADKHNMLGGCPK |
| SEQ ID NO: 737 | ERAEISMLEGAVLDIRYGVSRIAYSKDFETLKVDFLSKLPEMLK |
| | MFEDRLCHKTYLNGDHVTHPDFMLYDALDVVLYMDPMCLDA |
| | FPKLVCFKKRIEAIPQIDKYLKSSKYIAWPLQGWQATEGGGDHP |
| | PK |
| linker | GGGGGGS |
| SEQ ID NO: 738 | |
| Enterokinase cleavage tag | DDDDK |
| (Consensus cleavage target | |
| for bovine Enterokinase, | |
| light chain protease) | |
| SEQ ID NO: 739 | |

[0300] The sequences in Table 20 can be cloned alongside the sequence of interest (e.g., SEQ ID NO: 226, 571, or 620) into a standard cloning vector containing an ampicillin selection marker and either a chloramphenicol (Cm) or Tetracycline (Tet) selection marker that can replicate in E. coli and then be transferred to Bacillus subtilis strain K08 for production purposes, according to standard methods in the art. The fermentation product will result in a fusion protein (e.g., a GST-Bt.4Q7Flg22 fusion protein) which can be applied to the plant or plant part as a fusion protein, or isolated and applied with the GST tag cleaved to result in a purified polypeptide.

[0301] Other expression systems common in the art can be utilized to express bioactive priming polypeptides in a similar manner.

[0302] The bioactive priming polypeptides as described herein can be produced and purified either by the use of a protein tag(s) using affinity purification or by using column protease cleavage methods which release the un-tagged polypeptide(s). Methods of using this approach to make free versions of the bioactive priming polypeptides are commonly known and understood by one of ordinary skill in the art.

[0303] Protein tags usually comprise a relatively small sequence of amino acids incorporated into a translated polypeptide, basically providing a molecular tether for the bioactive priming polypeptide of interest. They are commonly used to aid in the expression and purification of recombinant polypeptides. The glutathione S-transferase (GST) tag was selected for the purposes of affinity purification of the bioactive priming polypeptides as described. A GST tag can be fused to either the N- or C-terminus of a polypeptide. GST tags are frequently combined with other tags for dual-labeling. Tags for the bioactive priming polypeptides can be useful to affinity purify them. The tags can also be cleaved off of the bioactive priming polypeptides using specific proteases and column-specific protease cleavage methods to release the purified un-tagged bioactive priming polypeptide or full-length precursor protein of interest. These methods are also common and well known to one of ordinary skill in the art. Other tags that can be utilized are known in the art, and include polyhistidine (His) tags, FLAG tags, antibody epitopes, streptavidin/biotin, among other purification tools.

[0304] Protein tags can be provided within the plasmid to produce the polypeptide. Ideally, the plasmid comprises, alongside the sequence encoding the polypeptide of interest, a secretion signal (e.g., the amyE or amyQ secretion signal) to promote secretion, and a protein tag (e.g., glutathione S transferase) to enhance the stability of the polypeptide, thereby enhancing production and stability. In preferred cases, the protein tag (e.g., GST) is linked to the polypeptide using a linker sequence comprising a consensus cleavage sequence. This can allow the addition of a targeted kinase that can cleave the tag and release the purified, isolated polypeptide. A suitable consensus cleavage sequence can comprise an enterokinase cleavage sequence (DDDDK, SEQ ID NO: 739), which can be cleaved by simple application of a bovine enterokinase, for example.

[0305] Therefore, a method is provided for producing a polypeptide comprising producing a fusion protein comprising any polypeptide described herein and an Enterokinase (EK) cleavage site via fermentation, the EK cleavage site serving to enhance activity and stability of the polypeptide. The fusion protein encoded by the plasmid can further comprise a protein tag (e.g., a poly-histidine (His) tag, a FLAG tag, an antibody epitope, streptavidin/biotin, glutathione S-transferase (GST), or any combination thereof), wherein the enterokinase cleavage site comprises a linking region connecting the polypeptide and the protein tag. The fusion protein can also comprise a secretion signal. The secretion signal can comprise an amyE or amyQ secretion signal (e.g., SEQ ID NO: 736), or it can comprise any one of SEQ ID NOs 563-570 or 779-787 or 797 as described above or any other secretion sequences that are well known to those skilled in the art. The polypeptide comprising the enterokinase (EK) cleavage site can be more stable and produced in higher yields using fermentation than a polypeptide lacking the enterokinase (EK) cleavage site. When desired, an enterokinase (e.g., a bovine enterokinase) can be applied to the fusion protein to activate (e.g., isolate) the polypeptide of interest. The enterokinase can be applied on-site to enable maximum stability of the bioactive priming polypeptide prior to administration.

[0306] The bioactive priming polypeptides can be provided in a synthetic form using commercially available peptide synthesis technologies to produce high purity polypeptides. Synthetic production of the bioactive priming polypeptides utilizes solid-phase or solution-phase peptide synthesis methodologies that are well known to one of ordinary skill in the art. Chemical synthesis methodologies include: a stepwise assembly of peptides from amino acid precursors, whereby peptide elongation proceeds via cleavage of a reversible amino acid protecting group followed by a coupling reaction between amino acids. Solid phase peptide synthesis is used to add a covalent attachment step that links the nascent peptide chain to an insoluble polymeric support whereby the anchored peptide can be extended by a series of cycles. Polypeptides may be optionally assembled in smaller units or fragments, that are later conjugated to product the full-length polypeptide sequence. Polypeptide extension reactions are driven to completion and then the synthesized polypeptide is removed from the solid support by washing with a strong acid, followed by steps to produce a highly purified peptide, optionally to include precipitation, salt exchange, filtration and lyophilization Mass spectrometry, nitrogen content, amino acid composition, and high-pressure liquid chromotography analyses are performed after the completion of synthesis and purification for confirmation of molecular mass, polypeptide sequence and determination of purity.

[0307] Any of the bioactive priming polypeptides as described herein for flagellin-associated polypeptides (Tables 1-5), RHPP (Table 11-13), thionin and thionin-like polypeptides (Table 15), serine proteases (Table 17), ACC deaminase (Table 18), or glucanases, amylases, and chitinases (Table 19) can be provided in synthetic forms.

[0308] Additionally, such methods can be used for making and using conserved assistance sequences preferably named signature (SEQ ID NOs: 542-548), signal anchor sorting (SEQ ID NOs: 549-562) and secretion (SEQ ID NOs: 563-570) sequences.

[0309] Retro inverso can also be made synthetically or chemically manufactured. Synthetic polypeptides produced in the all-D confirmation are prepared by replacing all the L-amino acid residues with their D-enantiomers resulting in a reversed or retro-all-D-isomer Flg polypeptide. Solid phase synthesis is used to prepare the retro-inverso versions of the Flg polypeptide(s). After synthesis and purification of the retro-inverso polypeptide(s), the amino acid composition is confirmed using mass spectrometry of the Flg polypeptide(s). The purity of the retro-inverso polypeptide(s) is then confirmed at a level greater or equal to 95% using HPLC analysis. The retro-inverso versions of the Flg polypeptide(s) are further characterized using HPLC retention time, relative molecular mass and amino acid composition values (IC50 μM). Retro inverso production using recombinant DNA technology generally involves the use of non-ribosomal protein synthesis mechanisms.

[0310] Retro-inverso synthetic Flg bioactive priming polypeptides prepared by solid phase synthesis could be tested for their capacity to bind to the FLS2 or alternative FLS receptors, for example, FLS3 also found in plants. Competitive ELISA experiments or in vivo binding assays with labeled peptides (e.g. biotin, GST) could be used to confirm the binding affinities of retro inverso Flg-associated polypeptides to plant FLS receptors.

[0311] Recombinant Bacteria that Express Bioactive Priming Polypeptides

[0312] A recombinant microorganism that expresses or overexpresses a polypeptide is also provided. The polypeptide comprises the polypeptides as described above for the composition. For example, the polypeptide can comprise a flagellin or flagellin-associated polypeptide, a RHPP; a thionin or thionin-like polypeptide), a glucanase polypeptide, an amylase polypeptide, a chitinase polypeptide, a serine protease polypeptide, or an ACC deaminase polypeptide. For example, the polypeptide can comprise a flagellin or flagellin-associated polypeptide having an amino acid sequence comprising any one of SEQ ID NOs: 226, 1-225, 227-375, 526, 528, 530, 532, 534, 536, 538, 540, 541, or 571-603; or an RHPP having an amino acid sequence comprising any one of 604, 606-610 and 745-755; or a thionin or thionin-like polypeptide having an amino sequence comprising any one of SEQ ID NOs: 620-719; or a glucanase polypeptide having an amino acid sequence comprising any one of SEQ ID NOs: 731-733 and 767-776; or an amylase having an amino acid sequence comprising SEQ ID NO: 734 or SEQ ID NO: 735; or a chitinase having an amino acid sequence comprising SEQ ID NO: 777 or SEQ ID NO: 778; or a serine protease having an amino acid sequence comprising any one of SEQ ID NOs: 721, 722 and 794-796; or an ACC deaminase polypeptide having an amino acid sequence comprising any one of SEQ ID NOs: 723-730.

[0313] The polypeptide can be overexpressed by the microorganism.

The recombinant microorganism can comprise a microorganism that is capable of making recombinant bioactive priming polypeptides or their precursors in an effective manner. The preferred microorganism would be from the genus Bacillus, a bacterium of the genus Paenibacillus, a fungus of the genus Penicillium, a bacterium of the genus Glomus, a bacterium of the genus Pseudomonas, a bacterium of the genus Arthrobacter, a bacterium of the genus Paracoccus, a bacterium of the genus Rhizobium, a bacterium of the genus Bradyrhizobium, a bacterium of the genus Azosprillium, a bacterium of the genus Enterobacter, a bacterium of the genus Escherichia, or any combination thereof.

[0314] The recombinant microorganism can comprise a bacterium of the genus Bacillus, a bacterium of the genus Paenibacillus, or any combination thereof.

[0315] For example, the microorganism can comprise Bacillus mycoides, Bacillus pseudomycoides, Bacillus cereus, Bacillus thuringiensis, Bacillus megaterium, Bacillus subtilis, Bacillus firmus, Bacillus aryabhattai, Bacillus amyloliquefaciens, Bacillus licheniformis, Bacillus circulans, Bacillus flexus, Bacillus nealsonii, Bacillus pumulis, Paenibacillus genus bacterium or a combination thereof.

[0316] Methods and approaches are commonly used by one of ordinary skill in the art to determine and verify the genus and species of the bacteria. A common method provides chromosomal DNA isolated from the bacteria with PCR amplification of the 16s rRNA region using universal primers (ACTCCTACGGGAGGCAGCAGT, SEQ ID NO: 740) and (GGGTTGCGCTCGTTG/AC, SEQ ID NO: 741). The PCR amplicons are then purified and sequenced for correct identification of the appropriate bacterial strain, for example a specific strain in the genera of Bacillus.

[0317] Sample protocols are generally known to one in the art for the preparation of chromosomal DNA, transformation of the DNA of genes encoding the polypeptides using a plasmid, producing the polypeptides in a host bacterium, for example, a Bacillus strain.

[0318] The Bacillus strains provided can produce any bioactive priming polypeptide as described herein or a combination thereof. For example, the strain can comprise: (a) Bacillus aryabhattai CAP53 (NRRL No. B-50819),

(b) Bacillus aryabhattai CAP56 (NRRL No. B-50817),
(c) Bacillus flexus BT054 (NRRL No. B-50816),
(d) Paracoccus kondratievae NC35 (NRRL No. B-50820),
(e) Bacillus mycoides BT155 (NRRL No. B-50921),
(f) Bacillus nealsonii BOBA57 (NRRL No. NRRL B-50821),
(g) Bacillus mycoides EE118 (NRRL No. B-50918),
(h) Bacillus subtilis EE148 (NRRL No. B-50927),
(i) Bacillus mycoides EE141 (NRRL NO. B-50916),
(j) Bacillus mycoides BT46-3 (NRRL No. B-50922),
(k) Bacillus cereus family member EE128 (NRRL No. B-50917),
(l) Paenibacillus massiliensis BT23 (NRRL No. B-50923),
(m) Bacillus cereus family member EE349 (NRRL No. B-50928),
(n) Bacillus subtilis EE218 (NRRL No. B-50926),
(o) Bacillus megaterium EE281 (NRRL No. B-50925),
(p) Bacillus cereus family member EE-B00377 (NRRL B-67119);
(q) Bacillus pseudomycoides EE-B00366 (NRRL B-67120),
(r) Bacillus mycoides EE-B00363 (NRRL B-67121),
(s) Bacillus pumilus EE-B00143 (NRRL B-67123),
(t) Bacillus thuringiensis EE-B00184 (NRRL B-67122),
(u) Bacillus mycoides EE116 (NRRL No. B-50919),
(v) Bacillus cereus family member EE417 (NRRL No. B-50974),
(w) Bacillus subtilis EE442 (NRRL No. B-50975),
(x) Bacillus subtilis EE443 (NRRL No. B-50976),
(y) Bacillus cereus family member EE444 (NRRL No. B-50977),
(z) Bacillus subtilis EE405 (NRRL No. B-50978),
(aa) Bacillus cereus family member EE439 (NRRL No. B-50979),
(bb) Bacillus megaterium EE385 (NRRL No. B-50980),
(cc) Bacillus cereus family member EE387 (NRRL No. B-50981),
(dd) Bacillus circulans EE388 (NRRL No. B-50982),
(ee) Bacillus thuringiensis EE319 (NRRL No. B-50983),
(ff) Bacillus cereus family member EE377 (NRRL No. B-67119),
(gg) Bacillus mycoides EE363 (NRRL No. B-67121),
(hh) Bacillus pseudomycoides EE366 (NRRL No. B-67120);
(ii) Bacillus thuringiensis BT013A (NRRL No. B-50924);
or any combination thereof. Each of these strains has been deposited with the United States Department of Agriculture (USDA) Agricultural Research Service (ARS), having the address 1815 North University Street, Peoria, Ill. 61604 U.S.A., and are identified by the NRRL deposit numbers provided in parentheses. Strains (a)-(d) and (g) were deposited on Mar. 11, 2013. Strains (e), (g)-(o), (u), and (ii) were deposited on Mar. 10, 2014. Strains (v)-(hh) were deposited on Sep. 10, 2014. Strain (ee) was deposited on Sep. 17, 2014. Strains (p)-(t), (ff), (gg), and (hh) were deposited on Aug. 19, 2015. Bacillus thuringiensis BT013A is also known as Bacillus thuringiensis 4Q7.

[0319] The isolation and characterization of these strains are described in the Examples found within International Publication No: WO/2017/161091, incorporated herein by reference in its entirety. For ease of identification of the organism, International Publication No: WO/2017/161091 A1 also provides the partial 16S ribosomal RNA sequences for each of these strains in a sequence list and in Table 17.

[0320] Any of the recombinant microorganisms can be used to overexpress a bioactive priming polypeptide as described herein for a flagellin-associated polypeptide (Tables 1-5), an RHPP (Table 11-13), a thionin or thionin-like polypeptide (Table 15), a serine protease polypeptide (Table 17), an ACC deaminase polypeptide (Table 18) or a glucanase, amylase or chitinase polypeptide (Table 19).

[0321] The recombinant microorganism can comprise a mixture of two or more of any of the recombinant microorganisms described herein.

[0322] The recombinant microorganism can be inactivated. Inactivation results in microorganisms that are unable to reproduce. Inactivation of microorganisms can be advantageous, for example because it allows for delivery of the microorganism to a plant or a plant growth medium while reducing or eliminating any detrimental effects that the live microorganism may have on a plant or on the environment. The recombinant microorganism can be inactivated by any physical or chemical means, e.g., by heat treatment, gamma irradiation, x-ray irradiation, UV-A irradiation, UV-B irradiation, or treatment with a solvent such as glutaraldehyde, formaldehyde, hydrogen peroxide, acetic acid, bleach, chloroform, or phenol, or any combination thereof.

c. Inducers

[0323] The inducer compound can comprise an amino acid or isomer thereof, a substituted or unsubstituted benzoic acid or derivative or salt thereof, a dicarboxylic acid or derivative or salt thereof, a benzodiathiazole, a betaine, a proline, a bacteriocide, a callose synthase inhibitor, a succinate dehydrogenase inhibitor, or salt thereof, or any combination thereof.

[0324] Amino Acid.

[0325] The composition can comprise an amino acid. The amino acids that can be used in the compositions herein are preferably distinct from the amino acids that comprise the polypeptides. For example, the amino acid can be an isolated amino acid. Further, the amino acid can comprise any isomer or stereoisomer of any amino acid. For example, the amino acid can be a D or an L amino acid and could be an alpha or beta isomer of an amino acid. The amino acids may be a proteinogenic (e.g., canonical) or non-proteinogenic amino acid. Particularly suitable amino acids that can be used as inducer compounds include cysteine and β-amino butyric acid (BABA), discussed below.

[0326] β-amino butyric acid (BABA) is an isomer of the amino acid aminobutyric acid with the chemical formula C₄H₉NO₂. BABA is a non-proteinogenic amino acid and not found in native proteins. It can induce plant disease resistance and also improves resistance to abiotic stresses when applied to plants.

[0327] L-Cysteine.

[0328] Cysteine has traditionally been considered to be a hydrophilic amino acid, based largely on the chemical parallel between its sulfhydryl group and the hydroxyl groups in the side chains of other polar amino acids with the formula HO₂CCH(NH₂)CH₂SH. The thiol side chain in cysteine often participates in enzymatic reactions, as a nucleophile. The thiol is susceptible to oxidation to give the disulfide derivative cystine, which serves an important structural role in many proteins. Cysteine has traditionally been considered to be a hydrophilic amino acid, based largely on the chemical parallel between its sulfhydryl group and the hydroxyl groups in the side chains of other polar amino acids. However, cysteine is also considered a proteinogenic amino acid. Cysteine can be provided to treat HLB in the forms of L- or D-cysteine and in any form that is provided as a cysteine analog, acid or salt thereof. L-cysteine levels in the plant have a multi-pronged effect and modulate plant responses to stress, in part through the synthesis of sulfur containing antimicrobial proteins and maintenance of cellular redox state (Gotor et al., “Signaling in the plant cytosol: cysteine or sulfide?” Amino Acids: 47: 2155-2164, 2015).

[0329] The cysteine included in the compositions described herein can be any analog, acid or salt of cysteine. For example, the compositions can comprise a cysteine having the form of L-cysteine, D-cysteine, DL-cysteine, analogs of L-cysteine comprising: DL homocysteine, L-cysteine methyl ester, L-cysteine ethyl ester, N-carbamoyl cysteine, N-acetylcysteine, L-cysteine sodium salt, L-cysteine monosodium salt L-cysteine disodium salt, L-cysteine monohydrochloride, L-cysteine hydrochloride, L-cysteine ethyl ester hydrochloride, L-cysteine methyl ester hydrochloride, other selenocysteines, seleno-DL-cysteine, N-isobutyryl-L-cysteine, N-isobutyryl-L-cyteine or an acid of cysteine such as cysteine sulfinic acid.

[0330] Benzoic Acid.

[0331] The composition can comprise a substituted or unsubstituted benzoic acid. Preferably, the substituted benzoic acid comprises salicylic acid or any derivative, analog or salt thereof. For example, the composition can comprise salicylic acid. Another analog of salyclic acid that can be used in the composition is benzothiadiazole, discussed below.

[0332] Benzothiadiazole.

[0333] The composition can comprise a benzothiadiazole as the inducer compound. Preferably, the benzothiadiazole comprises Benzo (1,2,3)-thiadiazole-7-carbothioic acid-S-methyl ester (BTH; C₈H₆N₂OS₂) available commercially as Actigard 50WG fungicide (Syngenta). BTH induces systemic and/or host plant acquired resistance and exhibits a unique mode of action which mimics the natural systemic acquired resistance (SAR) response found in most plant species. BTH is a salicylic acid analog with increased stability that is used agriculturally as an activator of plant immune responses and is approved for application to citrus trees as root drench or irrigation treatment to prevent HLB. This BTH inducer compound is advantageously used in combinations with Flg22 peptides to prevent and reduce citrus disease.

[0334] Dicarboxylic Acid.

[0335] The composition can comprise a dicarboxylic acid. Preferably, the dicarboxylic acid comprises oxalic acid. Therefore, the composition can comprise oxalic acid.

[0336] Bacteriocide.

[0337] The composition can comprise a bacteriocide. The bacteriocide can comprise streptomycin, penicillins, tetracyclines, oxytetracycline, kasugamycin, ampicillin, copper oxide, copper hydroxide, copper sulfide, copper sulfate, fine particle coppers, oxolinic acid, chlorotetracycline, acetic acid, or any combination thereof. Preferably, the bacteriocide comprises oxytetracycline.

[0338] Callose Synthase Inhibitor.

[0339] The composition can comprise a callose synthase inhibitor. Callose is a multi-functional polysaccharide in the form of β-1,3-glucan and some β-1,6-glucan linkages that is produced by a family of callose synthase enzymes. Callose is deposited in the cell wall to regulate various developmental processes and plant responses to abiotic and biotic stress. For example, callose is deposited around the plasmodesmata that connects cells, thus regulating flow between cells. During phloem formation, the callose is degraded between the developing sieve tube elements, thus opening the connections and allowing for transport of carbohydrates, primarily sucrose, in the plant. Callose can also act as a physical barrier to infection and is deposited within the cell wall in response to fungal and bacterial infection. The synthesis and breakdown of callose must be tightly regulated by the plant. Thus, callose degradation is facilitated by a family plant β-1,3-endoglucanases that either hydrolyze or transfer glycosides. Bacteria also express β-1,3-endoglucanases for degradation of β1,3-glucans derived from fungal and plant cell walls. Mis-regulation of callose deposition may occur in response to CLas infection due to increased activity of callose synthase and/or decreased β-1,3-endoglucanase activity. Compositions comprising callose synthase inhibitors can help clear phloem blockages from callose build up and assist with recovery in plants infected with HLB or CLas. The callose synthase inhibitors can comprise 2-deoxy-D-glucose (2-DDG), 3-aminobenzamide, 3-methoxybenzamide or any combination thereof. Preferably, the callose synthase inhibitor comprises 2-deoxy-D-glucose (2-DDG). 2-DDG is a non-metabolizable glucose analogue. It is a known inhibitor of callose synthase and when used in the compositions and methods described herein can aid in the removal of callose build-up caused by infection of citrus with the CLas bacteria.

[0340] Succinate Dehydrogenase Inhibitor.

[0341] The composition can comprise a succinate dehydrogenase inhibitor. Succinate dehydrogenase is a mitochondrial metabolic enzyme complex and is integral for cell respiration. The succinate dehydrogenase inhibitors can be used as a fungicide (e.g., the composition can comprise a fungicide comprising a succinate dehydrogenase inhibitor). The succinate dehydrogenase inhibitor can comprise a phenyl-benzamide, phenyl-oxo-ethyl thiophene amide, pyridinyl-ethyl-benzamide, furan-carboxamide, oxathin-carboxamide, thiazole-carboxamide, pyrazole-4-carboxamide, N-cyclopropyl-N-benzyl-pyrazole-carboxamide, N-methoxy-(phenyl-ethyl)-pyrazole-carboxamide, pyridine-carboxamide, or pyrazine-carboxamide, pydiflumetofen, benodanil, flutolanil, mepronil, isofetamid, fluopyram, fenfuram, carboxin, oxycarboxin, thifluzamide, benzovindiflupyr, bixafen, fluindapyr, fluxapyroxad, furametpyr, inpyrfluxam, isopyrazam, penflufen, penthiopyrad, sedaxane, isoflucypram, pydiflumetofen, boscalid, or pyraziflumid or any combination, homolog, or analog thereof. For example, the succinate dehydrogenase inhibitor fungicide can comprise a phenyl-benzamide, phenyl-oxo-ethyl thiophene amide, pyridinyl-ethyl-benzamide, furan-carboxamide, oxathin-carboxamide, thiazole-carboxamide, pyrazole-4-carboxamide, N-cyclopropyl-N-benzyl-pyrazole-carboxamide, N-methoxy-(phenyl-ethyl)-pyrazole-carboxamide, pyridine-carboxamide, or pyrazine-carboxamide, pydiflumetofen, isofetamid, oxycarboxin, benzovindiflupyr, bixafen, fluindapyr, inpyrfluxam, isopyrazam, penthiopyrad, isoflucypram, pydiflumetofen, pyraziflumid or any combination thereof. For example, the succinate dehydrogenase inhibitor can comprise bixafen.

[0342] Betaine.

[0343] The composition can comprise a betaine. As used herein, “betaine” refers to any betaine, betaine homolog, or betaine analog. The betaine can comprise glycine betaine, glycine betaine aldehyde, β-alanine betaine, betaine hydrochloride, cetyl betaine, proline betaine, choline-O-sulfate betaine, cocaamidopropyl betaine, oleyl betaine, sulfobetaine, lauryl betaine, octyl betaine, caprylamidopropyl betaine, lauramidopropyl betaine, isostearamidopropyl betaine, or a combination, homolog, or analog of any thereof.

[0344] For example, the betaine can comprise glycine betaine, glycine betaine aldehyde, β-alanine betaine, betaine hydrochloride, cetyl betaine, choline-O-sulfate betaine, cocaamidopropyl betaine, oleyl betaine, sulfobetaine, lauryl betaine, octyl betaine, caprylamidopropyl betaine, lauramidopropyl betaine, isostearamidopropyl betaine, or a combination, homolog, or analog of any thereof.

[0345] For example, the betaine can comprise glycine betaine or betaine hydrochloride.

[0346] The betaine can be derived from a plant source such as wheat (e.g., wheat germ or wheat bran) or a plant of the genus Beta (e.g., Beta vulgaris (beet)).

[0347] The betaine homolog or analog can comprise ectoine, choline, phosphatidylcholine, acetylcholine, cytidine disphosphate choline, dimethylethanolamine, choline chloride, choline salicylate, glycerophosphocholine, phosphocholine, a sphingomyelin, choline bitartrate, propio betaine, deanol betaine, homodeanol betaine, homoglycerol betaine, diethanol homobetaine, triethanol homobetaine, or a combination of any thereof.

[0348] Proline.

[0349] The composition can comprise a proline. As used herein, “proline” refers to any proline, proline analog, or proline homolog. The proline can comprise L-proline, D-proline, hydroxyproline, hydroxyproline derivatives, proline betaine, or a combination, derivative, homolog, or analog of any thereof.

[0350] For example, the proline can comprise L-proline.

[0351] The proline homolog or analog can comprise α-methyl-L-proline, α-benzyl-Lproline, trans-4-hydroxy-L-proline, cis-4-hydroxy-L-proline, trans-3-hydroxy-L-proline, cis-3-hydroxy-L-proline, trans-4-amino-L-proline, 3,4-dehydro-α-proline, (2S)-aziridine-2-carboxylic acid, (2S)-azetidine-2-carboxylic acid, L-pipecolic acid, proline betaine, 4-oxo-L-proline, thiazolidine-2-carboxylic acid, (4R)-thiazolidine-4-carboxylic acid, or a combination of any thereof. Compositions comprising a proline are effective protein stabilizers and can help prevent protein unfolding during periods of stress, including biotic and abiotic.

[0352] Unless otherwise specified each inducer compound can comprise from about 0.000001 wt. % to about 95 wt. %, from about 0.000001 wt. % to about 10 wt. %, from about 0.001 wt. % to about 5 wt. %, or from about 0.001 wt. % to about 1 wt. % of the composition, according to the total weight of the composition.

### II. Specific Compositions in Embodiments

[0353] The compositions herein can comprise any of the bioactive priming polypeptides or polypeptides described herein. Further, the compositions can consist essentially of the bioactive priming polypeptides or polypeptides as described herein.

[0354] The composition can comprise at least one bioactive priming polypeptide.

[0355] The composition can comprise at least one flagellin or flagellin-associated polypeptide. An amino acid sequence of the flagellin or flagellin associated polypeptide can comprise any one of SEQ ID NOs: 226, 289, 290, 291, 293, 294, 295, 300, 437, 526, 532, 534, 536, 538, 540, 571-585, and 587-603. In some cases, the amino acid sequence of the flagellin or flagellin associated polypeptide comprises any one of SEQ ID NOs: 226, 293, 295, 300, 540, 571-579, and 589-590. For example, the composition can comprise a flagellin or flagellin-associated polypeptide having an amino acid sequence comprising SEQ ID NO: 226, 590 or 571. For example, the composition can comprise a flagellin or flagellin-associated polypeptide having an amino acid sequence comprising SEQ ID NO: 226 or 571. For example, the composition can comprise a flagellin or flagellin-associated polypeptide having an amino acid sequence comprising or consisting of SEQ ID NO: 226.

[0356] The composition can comprise at least one retro inverso flagellin or flagellin-associated polypeptide. The retro-inverso flagellin or flagellin associated polypeptide can comprise a retro-inverso Flg22 polypeptide, a retro-inverso FlgII-28 polypeptide and/or an Flg15 polypeptide.

[0357] The composition can comprise at least one retro inverso Flg22 polypeptide. An amino acid sequence of the retro inverso Flg22 polypeptide can comprise any one of SEQ ID NOs: 376-450, 527, 531, 533, 535, 537 and 539.

[0358] The composition can comprise at least one retro-inverso FlgII-28 polypeptide. An amino acid sequence of the retro-inverso FlgII-28 polypeptide can comprise any one of SEQ ID NOs: 451-525.

[0359] The composition can comprise at least one retro-inverso Flg15 polypeptide. An amino acid sequence of the retro-inverso Flg15 polypeptide can comprise SEQ ID NOs: 529.

[0360] The composition can comprise at least one RHPP. An amino acid sequence of the RHPP polypeptide can comprise any one of SEQ ID Nos: 604, 607, 608, and 745-755. For example, the composition can comprise an RHPP having an amino acid sequence comprising SEQ ID NO: 604.

[0361] The composition can comprise at least one retro-inverso RHPP polypeptide. An amino acid sequence of the retro-inverso RHPP polypeptide can comprise any one of SEQ ID NO: 605, 609, 610, and 756-766.

[0362] The composition can comprise at least one thionin or thionin-like polypeptide. An amino acid sequence of the thionin or thionin-like polypeptide can comprise any one of SEQ ID NOs: 620-719. For example, the composition can comprise a thionin or thionin-like polypeptide having an amino acid sequence comprising SEQ ID NO: 620. In some instances, the thionin or thionin-like polypeptide can be fused to a phloem targeting sequence to form a fused polypeptide. The phloem or phloem targeting sequence can comprise any one of SEQ ID NOs: 611-619 or any combination thereof. In some cases, the phloem or phloem targeting sequence comprises SEQ ID NO: 611. In some cases, the fusion polypeptide comprising a thionin or thionin-like polypeptide and a phloem or phloem targeting sequence can comprise SEQ ID NO: 720.

[0363] The composition can comprise at least one glucanase polypeptide. An amino acid sequence of the glucanase polypeptide can comprise any one of SEQ ID NOs: 731-735 and 767-776. For example, the composition can comprise a β-1,3-glucanase. An amino acid sequence of the β-1,3-glucanase can comprise SEQ ID NO: 772 or 732.

[0364] The composition can comprise at least one amylase. An amino acid sequence of the amylase polypeptide can comprise SEQ ID NO: 734 or SEQ ID NO: 735.

[0365] The composition can comprise at least one chitinase. An amino acid sequence of the chitinase polypeptide can comprise SEQ ID NO: 777 or SEQ ID NO: 778.

[0366] The composition can comprise at least one serine protease polypeptide. An amino acid sequence of the serine protease polypeptide can comprise any one of SEQ ID NOs: 721, 722 and 794-796. For example, the composition can comprise a serine protease polypeptide having an amino acid sequence comprising SEQ ID NO: 722 or 795. For example, the composition can comprise a serine protease polypeptide having an amino acid sequence comprising SEQ ID NO: 794 or 796.

[0367] The composition can comprise at least one ACC deaminase polypeptide. An amino acid sequence of the ACC deaminase polypeptide can comprise any one of SEQ ID NOs: 723-730. For example, the composition can comprise an ACC deaminase polypeptide having an amino acid sequence comprising SEQ ID NO: 730.

[0368] The composition can comprise at least two bioactive polypeptides.

[0369] The composition can comprise a flagellin or flagellin associated polypeptide and a thionin or thionin-like polypeptide. For example, the composition can comprise a flagellin or flagellin associated polypeptide having an amino acid sequence comprising SEQ ID NO: 571 or 226 and a thionin polypeptide having an amino acid sequence comprising SEQ ID NO: 620.

[0370] The composition can comprise a flagellin or flagellin associated polypeptide and an RHPP polypeptide. For example, the composition can comprise a flagellin or flagellin associated polypeptide having an amino acid sequence comprising SEQ ID NO: 571 or 226 and an RHPP polypeptide having an amino acid sequence comprising SEQ ID NO: 604.

[0371] The composition can comprise a flagellin or flagellin associated polypeptide and a serine protease. For example, the composition can comprise a flagellin or flagellin associated polypeptide having an amino acid sequence comprising SEQ ID NO: 571 and a serine protease having an amino acid sequence comprising SEQ ID NO: 722. As another example, the composition can comprise a flagellin or flagellin associated polypeptide having an amino acid sequence comprising SEQ ID NO: 226 and a serine protease having an amino acid sequence comprising SEQ ID NO: 794. For example, the composition can comprise a flagellin or flagellin associated polypeptide having an amino acid sequence comprising SEQ ID NO: 226 and a serine protease having an amino acid sequence comprising SEQ ID NO: 722. As another example, the composition can comprise a flagellin or flagellin associated polypeptide having an amino acid sequence comprising SEQ ID NO: 226 and a serine protease having an amino acid sequence comprising SEQ ID NO: 796. For example, the composition can comprise a flagellin or flagellin associated polypeptide having an amino acid sequence comprising SEQ ID NO: 226 and a serine protease having an amino acid sequence comprising SEQ ID NO: 795.

[0372] The composition composition can comprise a flagellin or flagellin associated polypeptide and a glucanase. For example, the composition can comprise a flagellin or flagellin associated polypeptide having an amino acid sequence comprising SEQ ID NO: 571 and a glucanase having an amino acid sequence comprising any one of SEQ ID NOs: 731-735. In some cases, the composition can comprise a flagellin or flagellin associated polypeptide having an amino acid sequence comprising SEQ ID NO: 571 and a glucanase having an amino acid sequence comprising any one of SEQ ID NOs: 731-733 or any one of SEQ ID NOs: 767-766. As another example, the composition can comprise a flagellin or flagellin associated polypeptide having an amino acid sequence comprising SEQ ID NO: 226 and a glucanase having an amino acid sequence comprising any one of SEQ ID NOs: 731-733 and an amylase polypeptide having an amino acid sequence comprising SEQ ID NO: 734 or SEQ ID NO: 735. In some cases, the composition can comprise a flagellin or flagellin associated polypeptide having an amino acid sequence comprising SEQ ID NO: 226 and a glucanase having an amino acid sequence comprising any one of SEQ ID NOs: 731-733 or any one of SEQ ID NOs: 767-766. In some compositions the amino acid sequence of the glucanase polypeptide can comprise SEQ ID NO: 772. In some compositions the amino acid sequence of the glucanase polypeptide (e.g., a β-1,3-glucanase) can comprise SEQ ID NO: 732.

[0373] The composition can comprise glucanase and an amylase. For example, the composition can comprise a glucanase polypeptide (e.g., a β-1,3-glucanase) having an amino acid sequence comprising SEQ ID NO: 731-733 and 767-766 and an amylase polypeptide having an amino acid sequence comprising SEQ ID NO: 734 or SEQ ID NO: 735. In some compositions the amino acid sequence of the glucanase polypeptide can comprise SEQ ID NO: 772. In some compositions the amino acid sequence of the glucanase polypeptide (e.g., the β-1,3-glucanase) can comprise SEQ ID NO: 732.

[0374] The composition can comprise glucanase and a chitinase. For example, the composition can comprise a glucanase polypeptide (e.g., a β-1,3-glucanase) having an amino acid sequence comprising SEQ ID NO: 731-733 and 767-766 and a chitinase polypeptide having an amino acid sequence comprising SEQ ID NO: 777 or SEQ ID NO: 778. In some compositions the amino acid sequence of the glucanase polypeptide (e.g., a β-1,3-glucanase) can comprise SEQ ID NO: 772. In some compositions the amino acid sequence of the glucanase polypeptide (e.g., the β-1,3-glucanase) can comprise SEQ ID NO: 732.

[0375] The composition can comprise a glucanase and a serine protease. For example, the composition can comprise a glucanase polypeptide (e.g., a β-1,3-glucanase) having an amino acid sequence comprising SEQ ID NO: 731-733 and 767-766 and a serine protease polypeptide having an amino acid sequence comprising SEQ ID NO: 721, SEQ ID NO: 722 or any one of SEQ ID NO: 794-796. In some compositions, the amino acid sequence of the glucanase polypeptide (e.g., a β-1,3-glucanase) can comprise SEQ ID NO: 772. In some compositions the amino acid sequence of the glucanase polypeptide (e.g., the β-1,3-glucanase) can comprise SEQ ID NO: 732.

[0376] Compositions described herein having a glucanase in combination with an amylase, chitinase, or serine protease can further comprise at least one flagellin or flagellin associated polypeptide.

[0377] For example, a composition can comprise at least one flagellin or flagellin associated polypeptide, a β-1,3-endoglucanase and an amylase. For instance, the composition can comprise a flagellin or flagellin associated polypeptide having an amino acid sequence comprising SEQ ID NO: 226 or 571, a β-1,3-endoglucanase having an amino acid sequence comprising any one of SEQ ID NO: 731-733 and 767-776, and an amylase having an amino acid sequence comprising SEQ ID NO: 734 or 735. In some compositions the amino acid sequence of the glucanase polypeptide (e.g., the β-1,3-glucanase) can comprise SEQ ID NO: 732 or 772.

[0378] Alternatively, the composition can comprise at least one flagellin or flagellin associated polypeptide, a β-1,3-endoglucanase and a chitinase. For instance, the composition can comprise a flagellin or flagellin associated polypeptide having an amino acid sequence comprising SEQ ID NO: 226 or 571, a β-1,3-endoglucanase having an amino acid sequence comprising any one of SEQ ID NO: 731-733 and 767-776, and a chitinase having an amino acid sequence comprising SEQ ID NO: 777 or SEQ ID NO: 778. In some compositions the amino acid sequence of the glucanase polypeptide (e.g., the β-1,3-glucanase) can comprise SEQ ID NO: 732 or 772.

[0379] Alternatively, the composition can comprise at least one flagellin or flagellin associated polypeptide, a β-1,3-endoglucanase and a serine protease. For instance, the composition can comprise a flagellin or flagellin associated polypeptide having an amino acid sequence comprising SEQ ID NO: 226 or 571, a β-1,3-endoglucanase having an amino acid sequence comprising any one of SEQ ID NO: 731-733 and 767-776, and a serine protease having an amino acid sequence comprising SEQ ID NO: 721, SEQ ID NO: 722, or any one of SEQ ID NOs: 794-796. In some compositions the amino acid sequence of the glucanase polypeptide (e.g., the β-1,3-glucanase) can comprise SEQ ID NO: 732 or 772.

[0380] The composition can comprise a flagellin or flagellin associated polypeptide and an amylase. For example, the composition can comprise a flagellin or flagellin associated polypeptide having an amino acid sequence comprising SEQ ID NO: 226 or 571 and an amylase having an amino acid sequence comprising SEQ ID NO: 734 or 735.

[0381] The composition can comprise a flagellin or flagellin associated polypeptide and a chitinase. For example, the composition can comprise a flagellin or flagellin associated polypeptide having an amino acid sequence comprising SEQ ID NO: 226 or 571 and a chitinase having an amino acid sequence comprising SEQ ID NO: 777 or 778.

[0382] The composition can comprise a flagellin or flagellin associated polypeptide and an ACC deaminase. For example, the composition can comprise a flagellin or flagellin associated polypeptide having an amino acid sequence comprising SEQ ID NO: 226 or 571 and an ACC deaminase having an amino acid sequence comprising SEQ ID NO: 730.

[0383] The composition can comprise a root hair promoting polypeptide (RHPP) or a retro inverso root hair promoting polypeptide (RI-RHPP) and a glucanase. For example, the composition can comprise an RHPP having an amino acid sequence comprising any one of SEQ ID NOs: 604, 607-608 and 745-756 or an RI-RHPP comprising any one of SEQ ID NOs: 605, 609-610 and 757-766 and a β-1,3-glucanase having an amino acid sequence comprising any one of SEQ ID NOs: 731-733 and 767-776.

[0384] The composition can comprise a root hair promoting polypeptide (RHPP) or a retro inverso root hair promoting polypeptide (RI-RHPP) and an ACC deaminase. For example, the composition can comprise an RHPP having an amino acid sequence comprising any one of SEQ ID NOs: 604, 607-608 and 745-756 or an RI-RHPP comprising any one of SEQ ID NOs: 605, 609-610 and 757-766 and an ACC deaminase having an amino acid sequence comprising any one of SEQ ID NOs: 723-730.

[0385] The composition can comprise a bioactive polypeptide and at least one inducer compound.

[0386] The composition can comprise a flagellin or flagellin associated polypeptide and a callose synthase inhibitor. For example, the composition can comprise a flagellin or flagellin associated polypeptide having an amino acid sequence comprising SEQ ID NO: 226 or 571 and a callose synthase inhibitor. The callose synthase inhibitor can comprise 2-DDG. Optionally, the composition can further comprise a bacteriocide (e.g., oxytetracycline).

[0387] The composition can comprise a flagellin or flagellin associated polypeptide and an amino acid. For example, the composition can comprise a flagellin or flagellin associated polypeptide having an amino acid sequence comprising SEQ ID NO: 226 or 571 and an amino acid. The amino acid can comprise L-cysteine or β-amino-butyric acid (BABA). Preferably, the amino acid comprises β-amino-butyric acid (BABA). Optionally, the composition can further comprise a bacteriocide (e.g., oxytetracycline).

[0388] The composition can comprise a flagellin or flagellin associated polypeptide and a substituted or unsubstituted benzoic acid. For example, the composition can comprise a flagellin or flagellin associated polypeptide having an amino acid sequence comprising SEQ ID NO: 226 or 571 and a substituted or unsubstituted benzoic acid. The substituted benzoic acid can comprise salicylic acid. Optionally, the composition can further comprise a bacteriocide (e.g., oxytetracycline).

[0389] The composition can comprise a flagellin or flagellin associated polypeptide and a benzothiadiazole. For example, the composition can comprise a flagellin or flagellin associated polypeptide having an amino acid sequence comprising SEQ ID NO: 226 or 571 and a benzothiadiazole. The benzothiadiazole can comprise benzo (1,2,3)-thiadiazole-7-carbothioic acid-S-methyl ester, available commercially as ACTIGARD 50WG fungicide. Optionally, the composition can further comprise a bacteriocide (e.g., oxytetracycline).

[0390] The composition can comprise a flagellin or flagellin associated polypeptide and a dicarboxylic acid. For example, the composition can comprise a flagellin or flagellin associated polypeptide having an amino acid sequence comprising SEQ ID NO: 226 or 571 and a dicarboxylic acid. The dicarboxylic acid can comprise oxalic acid. Optionally, the composition can further comprise a bacteriocide (e.g., oxytetracycline).

[0391] The composition can comprise a flagellin or flagellin associated polypeptide and a betaine. For example, the composition can comprise a flagellin or flagellin associated polypeptide having an amino acid sequence comprising SEQ ID NO: 226 or 571 and a betaine. The betaine can comprise betaine hydrochloride or glycine betaine. Optionally, the composition can further comprise a bacteriocide (e.g., oxytetracycline).

[0392] The composition can comprise a flagellin or flagellin associated polypeptide and a proline. For example, the composition can comprise a flagellin or flagellin associated polypeptide having an amino acid sequence comprising SEQ ID NO: 226 or 571 and a proline. The proline can comprise L-proline. Optionally, the composition can further comprise a bacteriocide (e.g., oxytetracycline).

[0393] The composition can comprise a flagellin or flagellin associated polypeptide and an herbicide. For example, the composition can comprise a flagellin or flagellin associated polypeptide having an amino acid sequence comprising SEQ ID NO: 226 or 571 and a herbicide. The herbicide can comprise lactofen. Optionally, the composition can further comprise a bacteriocide (e.g., oxytetracycline). The composition can comprise a flagellin or flagellin associated polypeptide and a bacteriocide. For example, the composition can comprise a flagellin or flagellin associated polypeptide having an amino acid sequence comprising SEQ ID NO: 226 or 571 and a bacteriocide. The bacteriocide can comprise oxytetracycline.

[0394] When a composition includes the retro-inverso form of a Flg bioactive priming polypeptide (for example, RI Bt.4Q7 Flg 22 (SEQ ID NO: 376), the polypeptide exhibits enhanced stability and less degradation over time providing for more activity at the plant cell membrane surface, which enhances the ability of the polypeptide to bind to the receptor and be taken into the plant. Retro inverso forms of such Flg-associated bioactive priming polypeptides are used to provide enhanced stability of the agriculturally applied formulation whereby the Flg polypeptide(s) exhibits enhanced protection from proteolytic cleavage, which contributes to an overall greater activity and shelf life of the composition.

[0395] When the polypeptide comprises a root hair promoting polypeptide (RHPP), the composition can further comprise a flagellin or flagellin associated polypeptide. The RHPP can comprise any one of SEQ ID NOs: 604, 607-608 and 745-755. For example, the RHPP can comprise SEQ ID NO: 604. The amino acid sequence of the flagellin or flagellin-associated polypeptide can comprise any one of SEQ ID NOs: 1-525, 532, 534, 536, 538, 540, 571-585, 587, and 590, or any combination thereof. For example, the flagellin or flagellin associated polypeptide can comprise any one of SEQ ID NO: 226 or 571. In some instances, the RHPP can comprise SEQ ID NO: 604 and the flagellin or flagellin associated polypeptide can comprise SEQ ID NO: 226. In other instances, the RHPP can comprise SEQ ID NO: 604 and the flagellin or flagellin associated polypeptide can comprise SEQ ID NO: 571.

[0396] The polypeptides can be formulated in combination with an assistance polypeptide. The signature (SEQ ID NOs: 542-548), signal anchor sorting (SEQ ID NOs: 549-562) and secretion (SEQ ID NOs: 563-570) polypeptides can be combined with the bioactive priming polypeptides as described for targeting the polypeptides/peptides (Tables 1-5) to the plant cell membrane surface for improved binding and activation of the Flg-associated receptors. This means for efficient delivery and binding of the polypeptide to a plant provides growth promoting benefits, as well as enhanced protection to the plant or plant part.

[0397] The composition can comprise a glucanase polypeptide, an amylase polypeptide, an amino acid and a callose synthase inhibitor. Preferably, the glucanase polypeptide comprises a β-1,3-endoglucanase. For example, the composition can comprise a β-1,3-endoglucanase having an amino acid sequence comprising any one of SEQ ID NOs: 731-733 or 767-766 and an amylase having an amino acid sequence comprising SEQ ID NO: 734 or 735. The amino acid can comprise L-cysteine. The callose synthase inhibitor can comprise 2-DDG. The composition can further comprise at least one flagellin or flagellin associated polypeptide. The flagellin or flagellin associated polypeptide can have an amino acid sequence comprising SEQ ID NO: 226 or 571.

[0398] The composition can comprise a glucanase polypeptide, a chitinase polypeptide, an amino acid and a callose synthase inhibitor. Preferably, the glucanase polypeptide comprises a β-1,3-endoglucanase. For example, the composition can comprise a β-1,3-endoglucanase having an amino acid sequence comprising any one of SEQ ID NOs: 731-733 or 767-766 and an chitinase having an amino acid sequence comprising SEQ ID NO: 777 or 778. The amino acid can comprise L-cysteine. The callose synthase inhibitor can comprise 2-DDG. The composition can further comprise at least one flagellin or flagellin associated polypeptide. The flagellin or flagellin associated polypeptide can having an amino acid sequence comprising SEQ ID NO: 226 or 571.

[0399] The composition can comprise an a root hair promoting polypeptide (RHPP) or a retro inverso root hair promoting polypeptide (RI-RHPP) and a betaine. For example, the composition can comprise an RHPP having an amino acid sequence comprising any one of SEQ ID NOs: 604, 607-608 and 745-756 or an RI-RHPP comprising any one of SEQ ID NOs: 605, 609-610 and 757-766 and a betaine. The betaine can comprise betaine hydrochloride or glycine betaine. Optionally, the composition can further comprise a bacteriocide (e.g., oxytetracycline).

[0400] The composition can comprise a root hair promoting polypeptide (RHPP) or a retro inverso root hair promoting polypeptide (RI-RHPP) and a proline. For example, the composition can comprise an RHPP having an amino acid sequence comprising any one of SEQ ID NOs: 604, 607-608 and 745-756 or an RI-RHPP comprising any one of SEQ ID NOs: 605, 609-610 and 757-766 and a proline. The proline can comprise L-proline. Optionally, the composition can further comprise a bacteriocide (e.g., oxytetracycline).

[0401] The composition can comprise at least two inducer compounds.

[0402] The composition can comprise a bacteriocide and at least one of: 2-deoxy-D-glucose, BABA, benzothiadiazole and cysteine. For example, the composition can comprise a bacteriocide (i.e., oxytetracycline) and 2-deoxy-D-glucose.

[0403] The composition can comprise (A) at least one polypeptide and an inducer compound or (B) at least two polypeptides, optionally, with an inducer compound; or (C) at least two inducer compounds wherein:

[0404] (a) the polypeptide or polypeptides of (A) or (B) comprise:
[0405] (i) a flagellin or flagellin-associated polypeptide and an amino acid sequence of the flagellin or flagellin-associated polypeptide comprises any one of SEQ ID NOs: 571, 1-375, 526, 528, 530, 532, 534, 536, 538, 540, 541, 572-585, 587, and 589-603; or
[0406] (ii) a retro inverso Flg22 polypeptide and an amino acid sequence of the retro inverso Flg22 polypeptide comprises any one of SEQ ID NOs: 376-450, 527, 531, 533, 535, 537 and 539; or
[0407] (iii) a retro inverso FlgII-28 polypeptide and an amino acid sequence of the retro inverso FlgII-28 polypeptide comprises any one of SEQ ID NOs: 451-525, or 588; or
[0408] (iv) a retro inverso Flg15 polypeptide and an amino acid sequence of the retro inverso Flg15 polypeptide comprises SEQ ID NOs: 529 or 586; or
[0409] (v) a root hair promoting polypeptide (RHPP) and an amino acid sequence of the RHPP comprises any one of SEQ ID Nos: 604, 607, 608, and 745-755; or
[0410] (vi) a retro inverso root hair promoting polypeptide (RI RHPP) and an amino acid sequence of the RI RHPP comprises any one of SEQ ID NO: 605, 609, 610 and 756-766; or
[0411] (vii) a thionin or thionin-like polypeptide and an amino acid sequence of the thionin or thionin-like polypeptide comprises any one of SEQ ID NOs: 620-719; or
[0412] (viii) a glucanase polypeptide and an amino acid sequence of the glucanase polypeptide comprises any one of SEQ ID NOs: 731-733 and 767-776; or
[0413] (ix) an amylase polypeptide an an amino acid sequence of the amylase polypeptide comprises SEQ ID NO: 734 or 735; or
[0414] (x) a chitinase polypeptide and an amino acid sequence of the chitinase polypeptide comprises SEQ ID NO: 777 or 778; or
[0415] (xi) a serine protease polypeptide and an amino acid sequence of the serine protease polypeptide comprises SEQ ID NO: 721, 722 or 794-796; or
[0416] (xii) an ACC deaminase polypeptide and an amino acid sequence of the ACC deaminase polypeptide comprises any one of SEQ ID NOs: 723-730; or
[0417] (xiii) any combination thereof;

[0418] The inducer compound can comprise a callose synthase inhibitor, beta amino butyric acid (BABA), a betaine, a proline, salicylic acid, oxalic acid, a benzothiazole or any combination thereof when the polypeptide of (A) comprises any polypeptide from groups (i)-(v) but not polypeptides selected from the groups (vi) to (x);

[0419] The inducer compound can comprise a callose synthase inhibitor, β-amino butyric acid (BABA), a betaine, a proline, salicylic acid, oxalic acid or any combination thereof when the polypeptide of (A) comprises any polypeptide from groups (i)-(v) but not polypeptides selected from the groups (vi) to (x).

[0420] The inducer compound can comprise a callose synthase inhibitor, β-amino butyric acid (BABA), salicylic acid, oxalic acid or any combination thereof when the polypeptide of (A) comprises any polypeptide from groups (i)-(v) but not polypeptides selected from the groups (vi) to (x).

[0421] The inducer compound can comprise a callose synthase inhibitor, β-amino butyric acid (BABA), or any combination thereof when the polypeptide of (A) comprises any polypeptide from groups (i)-(v) but not polypeptides selected from the groups (vi) to (x).

[0422] The inducer compound can comprise a betaine or a proline when the polypeptide of (A) comprises any polypeptide from groups (i)-(v) but not polypeptides selected from the groups (vi) to (x).

[0423] The inducer compound can comprise salicylic acid or oxalic acid when the polypeptide of (A) comprises any polypeptide from groups (i)-(v) but not polypeptides selected from the groups (vi) to (x).

[0424] The inducer compound can comprise a bacteriocide, an amino acid or isomer thereof, a callose synthase inhibitor, a substituted or unsubstituted benzoic acid or derivative thereof, a dicarboxylic acid or a derivative thereof, a betaine, a proline, a benzothiazole, or any combination thereof when the polypeptide of (A) comprises any polypeptide from groups (vi) to (x).

[0425] The inducer compound can comprise the inducer compound and the inducer compound comprises a callose synthase inhibitor, beta amino butyric acid (BABA), betaine, a proline, salicylic acid, oxalic acid, a benzothiazole or any combination thereof when the two or more polypeptides of (B) comprise polypeptides selected from groups (i)-(v) but not polypeptides selected from the groups (vi) to (x).

[0426] The inducer compound can comprise a callose synthase inhibitor, β-amino butyric acid (BABA), a betaine, a proline, salicylic acid, oxalic acid or any combination thereof when the two or more polypeptides of (B) comprise polypeptides selected from groups (i)-(v) but not polypeptides selected from the groups (vi) to (x).

[0427] The inducer compound can comprise a callose synthase inhibitor, β-amino butyric acid (BABA), salicylic acid, oxalic acid or any combination thereof when the two or more polypeptides of (B) comprise polypeptides selected from groups (i)-(v) but not polypeptides selected from the groups (vi) to (x).

[0428] The inducer compound can comprise a callose synthase inhibitor, β-amino butyric acid (BABA), or any combination thereof when the two or more polypeptides of (B) comprise polypeptides selected from groups (i)-(v) but not polypeptides selected from the groups (vi) to (x).

[0429] The inducer compound can comprise a betaine or a proline when the two or more polypeptides of (B) comprise polypeptides selected from groups (i)-(v) but not polypeptides selected from the groups (vi) to (x).

[0430] The inducer compound can comprise salicylic acid or oxalic acid when the two or more polypeptides of (B) comprise polypeptides selected from groups (i)-(v) but not polypeptides selected from the groups (vi) to (x).

[0431] The composition can comprise at least one polypeptide selected from groups (i) to (x) and at least one inducer compound comprising a succinate dehydrogenase inhibitor.

[0432] The inducer compound can comprise a bacteriocide and at least one of a callose synthase inhibitor, β amino butyric acid (BABA), a proline, a benziothiaozole, salicylic acid, oxalic acid, succinate dehydrogenase inhibitor, or a betaine. The succinate dehydrogenase inhibitor can be bixafen. The callose synthase inhibitor can be 2-DDG. The bacteriocide can be oxytetracycline.

[0433] The inducer compound can comprise a bacteriocide and at least one of a callose synthase inhibitor, β amino butyric acid (BABA), a proline, a betaine, salicylic acid, succinate dehydrogenase inhibitor, or oxalic acid. The succinate dehydrogenase inhibitor can be bixafen. The callose synthase inhibitor can be 2-DDG. The bacteriocide can be oxytetracycline.

[0434] The inducer compound can comprise a bacteriocide and at least one of a callose synthase inhibitor, β amino butyric acid (BABA), salicylic acid, succinate dehydrogenase inhibitor, or oxalic acid. The succinate dehydrogenase inhibitor can be bixafen. The callose synthase inhibitor can be 2-DDG. The bacteriocide can be oxytetracycline.

[0435] The inducer compound can comprise a bacteriocide and a callose synthase inhibitor or β amino butyric acid (BABA). The callose synthase inhibitor can be 2-DDG. The bacteriocide can be oxytetracycline.

[0436] The inducer compound can comprise a callose synthase inhibitor and at least one of a beta amino butyric acid (BABA), a bacteriocide, a proline, a benzothiazole, salicylic acid, oxalic acid, a succinate dehydrogenase inhibitor, or a betaine. The succinate dehydrogenase inhibitor can be bixafen. The callose synthase inhibitor can be 2-DDG. The bacteriocide can be oxytetracycline.

[0437] For example, the composition can comprise (a) a flagellin or flagellin associated polypeptide and L-cysteine; or (b) a flagellin or flagellin associated polypeptide and 2-deoxy-D-glucose; or (c) a flagellin or flagellin associated polypeptide and an ACC deaminase; or (d) a flagellin or flagellin associated polypeptide and salicylic acid; or (e) a flagellin or flagellin associated polypeptide and oxalic acid; or (f) a flagellin or flagellin associated polypeptide and a benzothiadiazole; or (g) a flagellin or flagellin associated polypeptide and BABA; or (h) a flagellin or flagellin associated polypeptide and a betaine; or (i) a flagellin or flagellin associated polypeptide and a proline; or (j) a flagellin or flagellin associated polypeptide and a serine protease; or (k) a flagellin or flagellin associated polypeptide and a thionin or thionin-like polypeptide; or (l) a flagellin or flagellin associated polypeptide and an amylase; or (m) a flagellin or flagellin associated polypeptide and a chitinase; or (n) a bacteriocide and at least one of: 2-deoxy-D-glucose, BABA, benzothiadiazole, or cysteine; or (o) a serine protease; or (p) a thionin or thionin-like polypeptide; or (q) a serine protease and a thionin or thionin-like polypeptide; or (r) a flagellin or flagellin associated polypeptide and a glucanase; or (s) a flagellin or flagellin associated polypeptide, a glucanase, an amylase; or (t) a flagellin or flagellin associated polypeptide, a glucanase, an amylase, 2-DDG; or (u) a flagellin or flagellin associated polypeptide, a glucanase, an amylase, 2-DDG, and cysteine; or (v) a glucanase, an amylase, 2-DDG, and cysteine; or (w) a glucanase and an amylase; or (x) a flagellin or flagellin associated polypeptide, a glucanase, a chitinase; or (y) a flagellin or flagellin associated polypeptide, a glucanase, a chitinase, 2-DDG; or (z) a flagellin or flagellin associated polypeptide, a glucanase, a chitinase, 2-DDG, and cysteine; or (aa) a glucanase, a chitinase, 2-DDG, and cysteine; or (bb) a glucanase and a chitinase; or (cc) a glucanase and a chitinase; or (dd) a flagellin or flagellin associated polypeptide, a glucanase, and a serine protease; or (ee) a glucanase and an RHPP polypeptide or retro inverso RHPP polypeptide; or (ff) an RHPP polypeptide or retro-inverso RHPP polypeptide and a betaine; or (gg) an RHPP peptide or retro-inverso RHPP polypeptide and a proline; or (hh) an RHPP polypeptide or RHPP retro-inverso polypeptide and an ACC deaminase.

[0438] Further, any composition (a)-(hh) can further comprise a bacteriocide. The bacteriocide can comprise oxytetracycline.

[0439] Further, any composition (a)-(hh) can further comprise a succinate dehydrogenase inhibitor. The succinate dehydrogenase inhibitor can comprise bixafen.

[0440] Another composition is provided, the composition comprising bixafen and a free polypeptide (i.e., not bound to an exosporium of a Bacillus cereus family member or an intact Bacillus cereus family member spore). The free polypeptide can comprise (i) a flagellin or flagellin-associated polypeptide; or (ii) a retro inverso flagellin or flagellin-associated polypeptide; or (iii) a root hair promoting polypeptide (RHPP); or (iv) a retro inverso root hair promoting polypeptide (RI RHPP); or (v) a thionin or thionin-like polypeptide; or (vi) a glucanase polypeptide; or (vii) a serine protease polypeptide; or (viii) an ACC deaminase (1-aminocyclopropane-1-carboxylate deaminase) polypeptide; or (ix) an amylase; or (x) a chitinase; or (xi) any combination thereof.

[0441] The composition can comprise a free polypeptide comprising a root hair promoting polypeptide (RHPP), a retro-inverso root hair promoting polypeptide (RI-RHPP), a chitinase, a flagellin or flagellin associated polypeptide, a glucanase, a serine protease or any combination thereof.

[0442] The composition can comprise a free polypeptide wherein an amino acid sequence of the free polypeptide can comprise any one of SEQ ID NOs: 604, 606, 607 and 745-755 (root hair promoting polypeptide, RHPP), any one of SEQ ID NOs: 605, and 756-766 (retro-inverso root hair promoting polypeptide, RI-RHPP), any one of SEQ ID NOs 226 and 571 (flagellin or flagellin associated polypeptide), any one of SEQ ID NOs: 731-733 and 767-778 (glucanase), any one of SEQ ID NOs: 777 and 778 (chitinases) or any one of SEQ ID NOs: 721, 722 and 794-796 (serine proteases).

[0443] The composition can comprise bixafen and a free polypeptide comprising a root hair promoting polypeptide and an amino acid sequence of the RHPP can comprise any one of SEQ ID NOs: 604, 606, 607 and 745-755. For example, the amino acid sequence of the RHPP can comprise SEQ ID NO: 604.

[0444] As described herein, the compositions can comprise (A) at least one bioactive polypeptide and an inducer compound, (B) at least two bioactive polypeptides, optionally with an inducer compound, or (C) two inducer compounds. Preferred formulations are provided, therefore, for compositions comprising (a) polypeptides alone, (b) polypeptide(s) and inducer compound(s) and (c) inducer compounds alone. As described in the following preferred formulations “polypeptides” include “free polypeptides” as described in some compositions herein. Likewise, and as defined above, “bixafen” can be considered an inducer compound.

[0445] When the compositions comprise two or more bioactive polypeptides, the composition can comprise from about 0.0000001 wt. % to about 95% of the polypeptide(s), from about 0.01 wt. % to about 5 wt. % of the polypeptide(s), or from 0.005 wt. % to about 1 wt. % of the polypeptide(s), or from 0.005 wt. % to about 0.1 wt. % of the polypeptide(s) based on the total weight of the composition.

[0446] When the composition comprises at least one bioactive priming polypeptide and at least one inducer compound, the composition can comprise from about 0.0000001 wt. % to about 95 wt. % of the polypeptide and from about 0.000001 wt. % to about 95 wt. % of the inducer compound, based on the total weight of the composition. Alternatively, the composition can comprise from about 0.0000005 wt. % to about 10 wt. % of the polypeptide(s) and from about 0.000001 wt. % to about 95 wt. % of the inducer compound based on the total weight of the composition. Alternatively, the composition can comprise from about 0.001 wt. % to about 5 wt. % of the polypeptide(s) and from about 0.000001 wt. % to about 95 wt. % of the inducer compound based on the total weight of the composition. Alternatively, the composition can comprise from about 0.005 wt. % to about 1 wt. % (e.g., from about 0.005 wt. % to about 0.1 wt. %) of the polypeptide(s) and from about 0.000001 wt. % to about 95 wt. % of the inducer compound based on the total weight of the composition. In some cases, particularly when the inducer compound comprises a bacteriocide, the composition of any of these formulations can comprise from about 0.001 wt. % to about 95 wt. % of the inducer compound based on the total weight of the composition.

[0447] When the composition comprises two or more inducer compounds, the composition can comprise from about 0.000001 wt. % to about 95 wt. % of a first inducer and from about 0.000001 wt. % to about 95% wt. % of the second inducer based on the total weight of the composition. Alternatively, the composition can comprise from about 0.000001 wt. % to about 95 wt. % of the first inducer and from about 0.001 wt. % of the second inducer based on the total weight of the composition. Alternatively, the composition can comprise from about 0.001 wt. % of the first inducer and from about 0.000001 wt. % to about 95 wt. % of the second inducer based on the total weight of the composition. Preferably, the inducer compound comprises from about 0.000001 wt. % to about 95 wt. % of the composition, based on the total weight of the composition, when it comprises a callose synthase inhibitor, an amino acid, salicylic acid, oxalic acid, a betaine, a proline, a benzothiadiazole, a succinate dehydrogenase inhibitor, or any combination thereof. Preferably, the inducer compound comprises from about 0.001 wt. % to about 95 wt. % of the composition, based on the total weight of the composition, when the inducer compound comprises a bactericide.

[0448] The composition can include either an agrochemical or a carrier which is associated with the polypeptide in nature.

[0449] The agrochemical can be non-naturally occurring in combination with the polypeptide.

[0450] The agrochemical can include, but is not limited to, a preservative, a buffering agent, a wetting agent, a surfactant, a coating agent, a monosaccharide, a polysaccharide, an abrading agent, a pesticide, an insecticide, an herbicide, a nematicide, a bacteriocide, a fungicide, a miticide, a fertilizer, a biostimulant, a colorant, a humectant, an osmoprotectant, an antibiotic, an amino acid, a biological control agent, an osmoprotectant, or a combination thereof.

[0451] When the composition includes an amino acid, the amino acid can be provided separately from the amino acids that comprise the polypeptide. For example, an isolated amino acid can be used. Suitable amino acids include any natural or unnatural amino acids. For example, the composition can comprise cysteine.

[0452] The agrochemical can comprise an acid such as an acid that is present from chemical synthesis of any polypeptide described herein. For example, hydrochloric acid, acetic acid, or trifluoroacetic acid can be present if the polypeptide is synthesized such as by fermentation.

[0453] When the agrochemical is an acid, it can comprise from about 0.001 to about 30 wt. %, from about 0.01 to about 20 wt. %, or from about 0.1 to about 5 wt. % of the total weight of the composition.

[0454] Unless otherwise specified, each agrochemical can comprise from about 0.01 to about 99 wt. %, from about 0.1 to about 70 wt. %, or from about 0.1 to about 60 wt. % of the total weight of the composition.

[0455] When the composition includes a preservative, the preservative can comprise those based on dichlorophene and benzylalcohol hemi formal (PROXEL from ICI or ACTICIDE RS from Thor Chemie and KATHON MK from Dow Chemical) and isothiazolinone derivatives such as alkylisothiazolinones and benzisothiazolinones (ACTICIDE MBS from Thor Chemie). As further examples, suitable preservatives include MIT (2-methyl-4-isothiazolin-3-one), BIT (1,2-benzisothiazolin-3-one, which can be obtained from Avecia, Inc. as PROXEL GXL as a solution in sodium hydroxide and dipropylene glycol), 5-chloro-2-(4-chlorobenzyl)-3(2H)-isothiazolone, 5-chloro-2-methyl-2H-isothiazol-3-one, 5-chloro-2-methyl-2H-isothiazol-3-one, 5-chloro-2-methyl-2H-isothiazol-3-one-hydrochloride, 4,5-dichloro-2-cyclohexyl-4-isothiazolin-3-one, 4,5-dichloro-2-octyl-2H-isothiazol-3-one, 2-methyl-2H-isothiazol-3-one, 2-methyl-2H-isothiazol-3-one-calcium chloride complex, 2-octyl-2H-isothiazol-3-one, benzyl alcohol hemiformal, or any combination thereof.

[0456] When the composition includes a buffering agent, the buffering agent can comprise potassium, phosphoric acid, a phosphate salt, citric acid, a citrate salt, a sulfate salt, MOPS, or HEPES. The buffering agent can stabilize the polypeptide in the composition.

[0457] When the composition includes a wetting agent, the wetting agent can comprise organosilicones, polyoxyethoxylates, polysorbates, polyethyleneglycol and derivatives thereof, ethoxylates, crop oils, and polysaccharides.

[0458] When the composition includes a surfactant, the surfactant can comprise a heavy petroleum oil, a heavy petroleum distillate, a polyol fatty acid ester, a polyethoxylated fatty acid ester, an aryl alkyl polyoxyethylene glycol, a polyoxyethylenepolyoxypropylene monobutyl ether, an alkyl amine acetate, an alkyl aryl sulfonate, a polyhydric alcohol, an alkyl phosphate, an alcohol ethoxylate, an alkylphenol ethoxylate, an alkyphenol ethoxylate, an alkoxylated polyol, an alky polyethoxy ether, an alkylpolyoxethylene glycerol, ethoxylated and soybean oil derivatives, an organosilicone-based surfactant or any combination thereof. Surfactants can be included in a range of compositions including those for foliar use.

[0459] When the composition includes a coating agent, the coating agent can comprise a tackifier, polymers, filling agents, or bulking agents.

[0460] The tackifier can include, but is not limited to, carboxymethylcellulose and natural and synthetic polymers in the form of powders, granules, or latexes, such as gum Arabic, chitin, polyvinyl alcohol and polyvinyl acetate, as well as natural phospholipids, such as cephalins and lecithins, and synthetic phospholipids. Tackifiers include those composed preferably of an adhesive polymer that can be natural or synthetic without phytotoxic effect on the seed to be coated. Additional tackifiers that can be included, either alone or in combination, include, for example, polyesters, polyether esters, polyanhydrides, polyester urethanes, polyester amides; polyvinyl acetates; polyvinyl acetate copolymers; polyvinyl alcohols and tylose; polyvinyl alcohol copolymers; polyvinylpyrolidones; polysaccharides, including starches, modified starches and starch derivatives, dextrins, maltodextrins, alginates, chitosanes and celluloses, cellulose esters, cellulose ethers and cellulose ether esters including ethylcelluloses, methylcelluloses, hydroxymethylcelluloses, hydroxypropylcelluloses and carboxymethylcellulose; fats; oils; proteins, including casein, gelatin and zeins; gum arabics; shellacs; vinylidene chloride and vinylidene chloride copolymers; lignosulfonates, in particular calcium lignosulfonates; polyacrylates, polymethacrylates and acrylic copolymers; polyvinylacrylates; polyethylene oxide; polybutenes, polyisobutenes, polystyrene, polybutadiene, polyethyleneamines, polyethylenamides; acrylamide polymers and copolymers; polyhydroxyethyl acrylate, methylacrylamide monomers; and polychloroprene, or any combination thereof. Tackifiers can be used in a range of compositions including those for seed treatment.

[0461] When the composition includes an abrading agent, the abrading agent can comprise talc, graphite, or a combination of both.

[0462] A humectant is a hygroscopic substance that assists with the retention of moisture. When the composition includes a humectant, the humectant can comprise: glycerol, glycerin, a glycerol derivative (e.g. glycerol monosterate, glycerol triacetate, triacetin, propylene glycol, hexylene glycol, or butylene glycol), triethylene glycol, tripolypropylene glycol, glyceryl triacetate, sucrose, tagatose, a sugar alcohol or a sugar polyol (e.g glycerol, sorbitol, xylitol, mannitol, or mantitol), a polymeric polyol (e.g. polydextrose, a collagen, an aloe or an aloe vera gel), or an alpha hydroxy acid (e.g. lactic acid, honey, molasses, quillaia, sodium hexametaphosphate, lithium chloride or urea). Synthetic humectants can also comprise: butylene glycol, and tremella extract.

[0463] When the composition includes a pesticide, the pesticide can comprise an insecticide, a herbicide, a fungicide, a bacteriocide, a nematicide, a miticide, or any combination thereof.

[0464] When the composition includes an insecticide, the insecticide can comprise clothianidin, imidacloprid, an organophosphate, a carbamate, a pyrethroid, an acaricide, an alkyl phthalate, boric acid, a borate, a fluoride, sulfur, a haloaromatic substituted urea, a hydrocarbon ester, a biologically-based insecticide, or any combination thereof. For example, the insecticide can comprise clothianidin or imidacloprid.

[0465] The agrochemical can comprise an herbicide. The herbicide can comprise 2,4-D, 2,4-DB, acetochlor, acifluorfen, alachlor, ametryn, atrazine, aminopyralid, benefin, bensulfuron, bensulfuron methyl bensulide, bentazon, bispyribac sodium, bromacil, bromoxynil, butylate, carfentrazone, chlorimuron, 2-chlorophenoxy acetic acid, chlorsulfuron, chlorimuron ethyl, clethodim, clomazone, clopyralid, cloransulam, CMPP-P-DMA, cycloate, DCPA, desmedipham, dicamba, dichlobenil, diclofop, 2,4-dichlorophenol, dichlorophenoxyacetic acid, dichlorprop, dichlorprop-P, diclosulam, diflufenzopyr, dimethenamid, dimethyl amine salt of 2,4-dichlorophenoxyacetic acid, diquat, diuron, DSMA, endothall, EPTC, ethalfluralin, ethofumesate, fenoxaprop, fluazifop-P, flucarbazone, flufenacet, flumetsulam, flumiclorac, flumioxazin, fluometuron, fluroxypyr, fluorxypyr 1-methyleptylester, fomesafen, fomesafen sodium salt, foramsulfuron, glufosinate, glufosinate-ammonium, glyphosate, halosulfuron, halosulfuron-methyl, hexazinone, 2-hydroxyphenoxy acetic acid, 4-hydroxyphenoxy acetic acid, imazamethabenz, imazamox, imazapic, imazaquin, imazethapyr, isoxaben, isoxaflutole, lactofen, linuron, mazapyr, MCPA, MCPB, mecoprop, mecoprop-P, mesotrione, metolachlor-s, metribuzin, metsulfuron, metsulfuron-methyl, molinate, MSMA, napropamide, naptalam, nicosulfuron, norflurazon, oryzalin, oxadiazon, oxyfluorfen, paraquat, pelargonic acid, pendimethalin, phenmedipham, picloram, primisulfuron, prodiamine, prometryn, pronamide, propanil, prosulfuron, pyrazon, pyrithiobac, pyroxasulfone, quinclorac, quizalofop, rimsulfuron, sethoxydim, siduron, simazine, sulfentrazone, sulfometuron, sulfosulfuron, tebuthiuron, terbacil, thiazopyr, thifensulfuron, thifensulfuron-methyl, thiobencarb, tralkoxydim, triallate, triasulfuron, tribenuron, tribernuron-methyl, triclopyr, trifluralin, triflusulfuron, or any combination thereof.

[0466] When the composition includes a nematicide, the nematicide can comprise Bacillus firmus, fluopyram, antibiotic nematicides such as abamectin; carbamate nematicides such as acetoprole, Bacillus chitonosporus, chloropicrin, benclothiaz, benomyl, Burholderia cepacia, carbofuran, carbosulfan, and cleothocard; dazomet, DBCP, DCIP, alanycarb, aldicarb, aldoxycarb, oxamyl, diamidafos, fenamiphos, fosthietan, phosphamidon, cadusafos, chlorpyrifos, diclofenthion, dimethoate, ethoprophos, fensulfothion, fostiazate, harpins, heterophos, imicyafos, isamidofos, isazofos, methomyl, mecarphon, Myrothecium verrucaria, Paecilomyces lilacinus, Pasteuria nishizawae (including spores thereof), phorate, phosphocarb, terbufos, thionazin, triazophos, tioxazafen, dazomet, 1,2-dicloropropane, 1,3-dichloropropene, furfural, iodomethane, metam, methyl bromide, methyl isothiocyanate, xylenol, pydiflumetofen, or any combination thereof. For example, the nematicide can comprise Bacillus firmus strain i-2580, Pasteuria nishizawae (including spores thereof), or fluopyram.

[0467] When the composition includes a bacteriocide, the bacteriocide can comprise streptomycin, penicillins, tetracyclines, oxytetracycline, kasugamycin, ampicillin, oxolinic acid, chlorotetracycline, copper oxide, copper hydroxide, copper sulfide, copper sulfate, fine particle coppers, or any combination thereof. For example, the bacteriocide can comprise oxytetracycline.

[0468] Biological control agents are broadly defined as microorganisms that can be used instead of synthetic pesticides or fertilizers. When the composition includes a biological control agent, the biological control agent can comprise Bacillus thuringiensis, Bacillus megaterium, Bacillus mycoides isolate J, Bacillus methylotrophicus, Bacillus vallismortis, Chromobacterium subtsugae, Delftia acidovorans, Streptomyces lydicus, Streptomyces colombiensis, Streptomyces galbus K61, Penicillium bilaii, Banda de Lupinus albus doce (BLAD), an Aureobasidium pullalans strain, a lipopeptide-producing Bacillus subtilis strain, a lipopeptide-producing Bacillus amyloliquefaciens strain, a Bacillus firmus strain or a Bacillus pumilus strain. As another example, when the composition includes a biological control agent, the biological control agent can comprise Bacillus subtilis strain QST713, Bacillus pumulis strain QST 2808, Aureobasidium pullalans strain DMS 14940 Aureobasidium pulladans strain 14941, Penicillium bilaii, Banda de Lupinus albus doce (BLAD), and/or an Aureobasidium pullalans strain.

[0469] When the composition comprises an osmoprotectant the osmoprotectant can comprise a betaine or a proline. The betaine can comprise betaine hydrochloride or glycine betaine. The proline can comprise L-proline.

[0470] The agrochemical can include a fungicide. The fungicide can comprise a strobilurin fungicide, a triazole fungicide, a succinate dehydrogenase inhibitor fungicide, a laminarin, a pheylamide, a methyl benzimidazole carbamate, a anilino-pyrimidine, a phenylpyrrole, a dicarboximide, a carbamate, a piperidinyl-thiazole-isoxazoline, a demethylation inhibitor, a phosphonate, an inorganic copper, an inorganic sulfur, a thiocarbamate, a dithiocarbamate, a phthalimide, a chloronitrile, or a sulfamide.

[0471] The fungicide can comprise a harpin or harpin-like polypeptide. Harpin and harpin-like polypeptides are described in U.S Patent Publication No. 2019/0023750, hereby incorporated by reference in its entirety. The harpin or harpin-like polypeptides can be derived from Xanthomonas species or diverse bacteria genera including Pantoea sesami, Erwinia gerudensis, Pantoea sesami, or Erwinia gerudensis. Additional harpin-like fungicide polypeptides can be derived from the full length HpaG-like protein from Xanthamonas citri. Representative harpin-like polypeptides that can be incorporated into the compositions herein as a fungicide are described in Table 21, below. The harpins can advantageously be injected into a plant (i.e., into a tree trunk) to generate an immune response in combination with the bioactive polypeptides and inducers described herein.

TABLE 21
Fungicidal Harpin and Harpin-Like Polypeptides

| SEQ ID NO: | Peptide Sequence Amino Acid |
|---|---|
| Harpin-like (HpaG-like) | NQGISEKQLDQLLTQLIMALLQQ |
| SEQ ID NO: 788 | |
| Xanthomonas species | |
| MW 2626.35 Da | |
| Harpin-like (HpaG-like) | LDQLLTQLIMAL |
| SEQ ID NO: 789 | |
| Xanthomonas species | |
| MW 2626.35 Da | |
| Harpin-like (HpaG-like) | SEKQLDQLLTQLIMALLQQ |
| SEQ ID NO: 790 | |
| Xanthomonas species | |
| MW 2626.35 Da | |
| HpaG-Like Protein | MMNSLNTQLGANSSFFQVDPSQNTQSGSNQGN |
| SEQ ID NO: 791 | QGISEKQLDQLLTQLIMALLQQSNNAEQGQGQG |
| Xanthamonas citri | QGGDSGGQGGNRQQAGQSNGSPSQYTQMLMNI |
| | VGDILQAQNGGGFGGGFGGGFGGGLGTSLGTSL |
| | GTSLASDTGSMQ |
| HpaG Homolog Active Fraction | QLEQLMTQLRARLCRLMAM |
| SEQ ID NO: 792 | |
| Pantoea sesami | |
| HpaG Homolog Active Fraction | QLEQLMTQLRARLKRLMAM |
| SEQ ID NO: 793 | |
| Erwinia gerudensis | |

[0472] The fungicide can comprise acibenzolar-S-methyl, aldimorph, aluminum-tris, ametocradin, ampropylfos, ampropylfos potassium, andoprim, anilazine, azaconazole, azoxystrobin, benalaxyl, benodanil, benomyl, benzamacril, benzamacryl-isobutyl, benzovindflupyr, bialaphos, binapacryl, biphenyl, bitertanol, bixafen, blasticidin-S, boscalid, bromuconazole, bupirimate, buthiobate, calcium polysulphide, capsimycin, captafol, captan, carbendazim, carvon, quinomethionate, chlobenthiazone, chlorantraniliprole, chlorfenazole, chloroneb, chloropicrin, chlorothalonil, chlozolinate, clozylacon, cresilym methyl, cufraneb, cymoxanil, cyproconazole, cyprodinil, cyprofuram, debacarb, dichlorophen, diclobutrazole, diclofluanid, diclomezine, dicloran, diethofencarb, dimethirimol, dimethomorph, dimoxystrobin, diniconazole, diniconazole-M, dinocap, diphenylamine, dipyrithione, ditalimfos, dithianon, dodemorph, dodine, drazoxolon, edifenphos, epoxiconazole, etaconazole, ethirimol, etridiazole, famoxadone, fenamidone, fenapanil, fenarimol, fenbuconazole, fenfuram, fenitropan, fenpiclonil, fenpropidin, fenpropimorph, fentin acetate, fentin hydroxide, ferbam, ferimzone, fluazinam, fludioxonil, flumetover, fluopyram, fluoromide, fluoxastrobin fluquinconazole, flurprimidol, flusilazole, flusulfamide, flutolanil, flutriafol, folpet, fosetyl-aluminium, fosetyl-sodium, fthalide, fuberidazole, furalaxyl, furametpyr, furcarbonil, furconazole, furconazole-cis, furmecyclox, guazatine, hexachlorobenzene, hexaconazole, hymexazole, imazalil, imibenconazole, iminoctadine, iminoctadine albesilate, iminoctadine triacetate, iodocarb, iprobenfos (IBP), iprodione, irumamycin, isoprothiolane, isovaledione, kasugamycin, kresoxim-methyl, copper preparations, such as: copper hydroxide, copper naphthenate, copper oxychloride, copper sulphate, copper oxide, oxine-copper and Bordeaux mixture, mancopper, mancozeb, mandipropamid, maneb, meferimzone, mefentrifuconazole, mepanipyrim, mepronil, metalaxyl, metconazole, metalzxyl, methasulfocarb, methfuroxam, metiram, metomeclam, metominostrobin, metrafenone, metsulfovax, mildiomycin, myclobutanil, myclozolin, nickel dimethyldithiocarbamate, nitrothal-isopropyl, nuarimol, ofurace, oxadixyl, oxamocarb, oxathiapiprolin, oxolinic acid, oxycarboxim, oxyfenthiin, paclobutrazole, pefurazoate, penconazole, pencycuron, penthiopyrad, phosdiphen, picoxystrobin, pimaricin, piperalin, polyoxin, polyoxorim, potassium phosphite, probenazole, prochloraz, procymidone, propamocarb, propanosine-sodium, propiconazole, propineb, prothiocinazole, pydiflumetofen, pyrazophos, pyrifenox, pyrimethanil, pyroquilon, pyroxyfur, quinconazole, quinoxyfen, quintozene (PCNB), a strobilurin, sulphur and sulphur preparations, tebuconazole, tecloftalam, tecnazene, tetcyclasis, tetraconazole, thiabendazole, thicyofen, thifluzamide, thiophanate-methyl, tioxymid, tolclofos-methyl, tolylfluanid, triadimefon, triadimenol, triazbutil, a triazole, triazoxide, trichlamide, tricyclazole, triclopyr, tridemorph, trifloxystrobin, triflumizole, triforine, uniconazole, validamycin A, vinclozolin, viniconazole, zarilamide, zineb, ziram and also Dagger G, OK-8705, OK-8801, a-(1,1-dimethylethyl)-(3-(2-phenoxyethyl)-1H-1,2,4-triazole-1-ethanol, a-(2,4-dichlorophenyl)-[3-fluoro-3-propyl-1H-1,2,4-triazole-1-ethanol, a-(2,4-dichlorophenyl)-[3-methoxy-α-methyl-1H-1,2,4-triazole-1-ethanol, a-(5-methyl-1,3-dioxan-5-yl)-[3-[[4-(trifluoromethyl)-phenyl]-methylene]-1H-1,2,4-triazole-1-ethanol, (5RS,6RS)-6-hydroxy-2,2,7,7-tetramethyl-5-(1H-1,2,4-triazol-1-yl)-3-octanone, (E)-a-(methoxyimino)-N-methyl-2-phenoxy-phenylacetamide, 1-isopropyl {2-methyl-1-[[[1-(4-methylphenyl)-ethyl]-amino]-carbonyl]-propyl}carbamate, 1-(2,4-dichlorophenyl)-2-(1H-1,2,4-triazol-1-yl)-ethanone-O-(phenyl methyl)-oxime, 1-(2-methyl-1-naphthalenyl)-1H-pyrrole-2,5-dione, 1-(3,5-dichlorophenyl)-3-(2-propenyl)-2,5-pyrrolidindione, 1-[(diiodomethyl)-sulphonyl]-4-methyl-benzene, 1-[[2-(2,4-dichlorophenyl)-1,3-dioxolan-2-yl]-methyl]-1H-imidazole, 1-[[2-(4-chlorophenyl)-3-phenyloxiranyl]-methyl]-1H-1,2,4-triazole, 1-[1-[2-[(2,4-dichlorophenyl)-methoxy]-phenyl]-ethenyl]-1H-imidazole, 1-methyl-5-nonyl-2-(phenylmethyl)-3-pyrrolidinole, 2′,6′-dibromo-2-methyl-4′-trifluoromethoxy-4′-trifluoro-methyl-1,3-thiazole-carboxanilide, 2,2-dichloro-N-[1-(4-chlorophenyl)-ethyl]-1-ethyl-3-methyl-cyclopropanecarboxamide, 2,6-dichloro-5-(methylthio)-4-pyrimidinyl-thiocyanate, 2,6-dichloro-N-(4-trifluoromethylbenzyl)-benzamide, 2,6-dichloro-N-[[4-(trifluoromethyl)-phenyl]-methyl]-benzamide, 2-(2,3,3-triiodo-2-propenyl)-2H-tetrazole, 2-[(1-methylethyl)-sulphonyl]-5-(trichloromethyl)-1,3,4-thiadiazole, 2-[[6-deoxy-4-O-(4-O-methyl-(3-D-glycopyranosyl)-a-D-glucopyranos yl]-amino]-4-methoxy-1H-pyrrolo [2,3-d]pyrimidine-5-carbonitrile, 2-aminobutane, 2-bromo-2-(bromomethyl)-pentanedinitrile, 2-chloro-N-(2,3-dihydro-1,1,3-trimethyl-1H-inden-4-yl)-3-pyridinecarboxamide, 2-chloro-N-(2,6-dimethylphenyl)-N-(isothiocyanatomethyl)-acetamide, 2-phenylphenol (OPP), 3,4-dichloro-1-[4-(difluoromethoxy)-phenyl]-pyrrole-2,5-dione, 3,5-dichloro-N-[cyano[(1-methyl-2-propynyl)-oxy]-methyl]-benzamide, 3-(1,1-dimethylpropyl-1-oxo-1H-indene-2-carbonitrile, 3-[2-(4-chlorophenyl)-5-ethoxy-3-isoxazolidinyl]-pyridine, 4-chloro-2-cyano-N,N-dimethyl-5-(4-methylphenyl)-1H-imidazole-1-sulphonamide, 4-methyl-tetrazolo[1,5-a]quinazolin-5(4H)-one, 8-(1,1-dimethylethyl)-N-ethyl-N-propyl-1,4-dioxaspiro[4,5]decane-2-methanamine, 8-hydroxyquinoline sulphate, 9H-xanthene-2-[(phenylamino)-carbonyl]-9-carboxylic hydrazide, bis-(1-methylethyl)-3-methyl-4-[(3-methylbenzoyl)-oxy]-2,5-thiophenedicarboxylate, cis-1-(4-chlorophenyl)-2-(1H-1,2,4-triazol-1-yl)-cycloheptanol, cis-4-[3-[4-(1,1-dimethylpropyl)-phenyl-2-methylpropyl]-2,6-dimethyl-morpholine hydrochloride, ethyl [(4-chlorophenyl)-azo]-cyanoacetate, potassium bicarbonate, methanetetrathiol-sodium salt, methyl 1-(2,3-dihydro-2,2-dimethyl-inden-1-yl)-1H-imidazole-5-carboxylate, methyl N-(2,6-dimethylphenyl)-N-(5-isoxazolylcarbonyl)-DL-alaninate, methyl N-(chloroacetyl)-N-(2,6-dimethylphenyl)-DL-alaninate, N-(2,3-dichloro-4-hydroxyphenyl)-1-methyl-cyclohexanecarboxamide, N-(2,6-dimethyl phenyl)-2-methoxy-N-(tetra hydro-2-oxo-3-furanyl)-acetamide, N-(2,6-dimethyl phenyl)-2-methoxy-N-(tetrahydro-2-oxo-3-thienyl)-acetamide, N-(2-chloro-4-nitrophenyl)-4-methyl-3-nitro-benzenesulphonamide, N-(4-cyclohexylphenyl)-1,4,5,6-tetrahydro-2-pyrimidinamine, N-(4-hexylphenyl)-1,4,5,6-tetrahydro-2-pyrimidinamine, N-(5-chloro-2-methylphenyl)-2-methoxy-N-(2-oxo-3-oxazolidinyl)-acetamide, N-(6-methoxy)-3-pyridinyl)-cyclopropanecarboxamide, N-[2,2,2-trichloro-1-[(chloroacetyl)-amino]-ethyl]-benzamide, N-[3-chloro-4,5-bis(2-propinyloxy)-phenyl]-N′-methoxy-methanimidamide, N-formyl-N-hydroxy-DL-alanine-sodium salt, 0,0-diethyl [2-(dipropylamino)-2-oxoethyl]-ethylphosphoramidothioate, O-methyl S-phenyl phenylpropylphosphoramidothioate, S-methyl 1,2,3-benzothiadiazole-7-carbothioate, and spiro[2H]-1-benzopyrane-2,1′(3′H)-isobenzofuran]-3′-one, N-trichloromethyl)thio-4-cyclohexane-1,2-dicarboximide, tetramethylthioperoxydicarbonic diamide, methyl N-(2,6-dimethylphenyl)-N-(methoxyacetyl)-DL-alaninate, 4-(2,2-difluoro-1,3-benzodioxol-4-yl)-1-H-pyrrol-3-carbonitril, or any combination thereof.

[0473] When the polypeptides are formulated or applied in combination with commercially available fungicides, the compositions can provide an extra layer of protection for enhancing disease prevention or spread in a plant. The combination of the polypeptides with a fungicide (e.g., a fungicide from the succinate dehydrogenase class) can protect a plant against a primary or secondary fungal infection which may occur if the plant has become compromised or weakened due to exposure to abiotic stress or disease.

[0474] The strobilurin fungicide can comprise a Strobilurin A, a Strobilurin B, a Strobilurin C, a Strobilurin D, a Strobilurin E, a Strobilurin F, a Strobilurin G, a Strobilurin H, an Azoxystrobin, a Trifloxystrobin, a Kresoxim methyl, a Fluoxastrobin, Picoxystrobin, or any combination thereof.

[0475] The strobilurin fungicide can comprise a non-naturally occurring strobilurin fungicide such as an Azoxystrobin, a Trifloxystrobin, a Kresoxim methyl, a Fluoxastrobin, or any combination thereof. For example, the strobilurin fungicide can comprise a Trifloxystrobin, Fluoxastrobin or Picoxystrobin. Strobilurin fungicides are used to control a range of fungal diseases, including water molds, downy mildews, powdery mildews, leaf spotting and blighting fungi, fruit rotters, and rusts. They are useful for treating a variety of crops, including cereals, field crops, fruits, tree nuts, vegetables, turfgrasses, and ornamentals.

[0476] The triazole fungicide can comprise prothioconazole, imidazole, imidazil, prochloraz, propiconazole, triflumizole, diniconazole, flusilazole, penconazole, hexaconazole, cyproconazole, myclobutanil, tebuconazole, difenoconazole, tetraconazole, fenbuconazole, epoxiconazole, metconazole, fluquinconazole, triticonazole, or any combination thereof.

[0477] The succinate dehydrogenase inhibitor fungicide can comprise a phenyl-benzamide, phenyl-oxo-ethyl thiophene amide, pyridinyl-ethyl-benzamide, furan-carboxamide, oxathin-carboxamide, thiazole-carboxamide, pyrazole-4-carboxamide, N-cyclopropyl-N-benzyl-pyrazole-carboxamide, N-methoxy-(phenyl-ethyl)-pyrazole-carboxamide, pyridine-carboxamide, or pyrazine-carboxamide, pydiflumetofen, benodanil, flutolanil, mepronil, isofetamid, fluopyram, fenfuram, carboxin, oxycarboxin, thifluzamide, benzovindiflupyr, bixafen, fluindapyr, fluxapyroxad, furametpyr, inpyrfluxam, isopyrazam, penflufen, penthiopyrad, sedaxane, isoflucypram, pydiflumetofen, boscalid, pyraziflumid or any combination thereof.

[0478] For example, the succinate dehydrogenase inhibitor fungicide can comprise a phenyl-benzamide, phenyl-oxo-ethyl thiophene amide, pyridinyl-ethyl-benzamide, furan-carboxamide, oxathin-carboxamide, thiazole-carboxamide, pyrazole-4-carboxamide, N-cyclopropyl-N-benzyl-pyrazole-carboxamide, N-methoxy-(phenyl-ethyl)-pyrazole-carboxamide, pyridine-carboxamide, or pyrazine-carboxamide, pydiflumetofen, isofetamid, oxycarboxin, benzovindiflupyr, bixafen, fluindapyr, inpyrfluxam, isopyrazam, penthiopyrad, isoflucypram, pydiflumetofen, pyraziflumid or any combination thereof.

[0479] For example, the succinate dehydrogenase inhibitor can comprise bixafen.

[0480] The composition can comprise a root hair promoting polypeptide or a retro inverso root hair promoting polypeptide and a succinate dehydrogenase inhibitor. For example, the composition can comprise a root hair promoting polypeptide or a retro inverso root hair promoting polypeptide having an amino acid sequence comprising any one of SEQ ID NOs: 745-766 and a succinate dehydrogenase inhibitor. The succinate dehydrogenase inhibitor can comprise bixafen. The root hair promoting polypeptide or the retro inverso root hair promoting polypeptide can comprise a free polypeptide.

[0481] The composition can comprise flagellin or flagellin associated polypeptide or a retro inverso flagellin or flagellin-associated polypeptide and a succinate dehydrogenase inhibitor. For example, the composition can comprise a flagellin or flagellin associated polypeptide having an amino acid sequence comprising any one of SEQ ID NOs: 226, 289, 290, 291, 293, 294, 295, 300, 437, 526, 532, 534, 536, 538, 540, 571-585, and 587-603 or a retro inverso flagellin or flagellin associated polypeptide having an amino acid sequence comprising any one of SEQ ID NOs: 376-525, 527, 529, 531, 533, 535, 537, 539, or 588, or 586 and a succinate dehydrogenase inhibitor. The succinate dehydrogenase inhibitor can comprise bixafen. The serine protease can comprise a free polypeptide.

[0482] The composition can comprise a glucanase and a succinate dehydrogenase inhibitor. For example, the composition can comprise glucanase having an amino acid sequence comprising any one of SEQ ID NOs: 731-733 and 767-776 and a succinate dehydrogenase inhibitor. The succinate dehydrogenase inhibitor can comprise bixafen. The glucanase can comprise a free polypeptide.

[0483] The composition can comprise a chitinase and a succinate dehydrogenase inhibitor. For example, the composition can comprise a chitinase having an amino acid sequence comprising SEQ ID NO: 777 or 778 and a succinate dehydrogenase inhibitor. The succinate dehydrogenase inhibitor can comprise bixafen. The chitinase can comprise a free polypeptide.

[0484] The composition can comprise a serine protease and a succinate dehydrogenase inhibitor. For example, the composition can comprise a serine protease having an amino acid sequence comprising any one of SEQ ID NOs: 721, 722, and 794-796 and a succinate dehydrogenase inhibitor. The succinate dehydrogenase inhibitor can comprise bixafen. The serine protease can comprise a free polypeptide.

[0485] The composition can comprise a thionin and a succinate dehydrogenase inhibitor. For example, the composition can comprise a thionin having an amino acid sequence comprising any one of SEQ ID NOs: 620-719 and a succinate dehydrogenase inhibitor. The succinate dehydrogenase inhibitor can comprise bixafen. The thionin or thionin-like polypeptide can comprise a free polypeptide.

[0486] The composition can comprise an ACC deaminase polypeptide and a succinate dehydrogenase inhibitor. For example, the composition can comprise an ACC deaminase polypeptide having an amino acid sequence comprising any one of SEQ ID NOs: 723-730 and a succinate dehydrogenase inhibitor. The succinate dehydrogenase inhibitor can comprise bixafen. The ACC deaminase can comprise a free polypeptide.

[0487] The bioactive priming polypeptides can be delivered in combination with strobilurins and triazole fungicides, especially fluoxastrobin or trifloxystrobin in combination with prothioconazole. As an additional example, the bioactive priming polypeptides can be delivered in combination with a succinate dehydrogenase inhibitor fungicide (e.g., bixafen).

[0488] In addition, the fungicide can comprise azoxystrobin, carboxin, difenoconazole, fludioxonil, fluxapyroxad, ipconazole, mefenoxam, pyraclostrobin, silthiofam, sedaxane, thiram, triticonazole or any combination thereof.

[0489] In addition to foliar applied fungicides as described herein, the bioactive priming polypeptides can be provided in combination with a fungicide, an insecticide, a nematicide, a bacteriocide, and a miticide or any agrochemical which is a biological agent.

[0490] The agrochemical can include a fertilizer. The fertilizer can comprise ammonium sulfate, ammonium nitrate, ammonium sulfate nitrate, ammonium chloride, ammonium bisulfate, ammonium polysulfide, ammonium thiosulfate, aqueous ammonia, anhydrous ammonia, ammonium polyphosphate, aluminum sulfate, calcium nitrate, calcium ammonium nitrate, calcium sulfate, calcined magnesite, calcitic limestone, calcium oxide, calcium nitrate, dolomitic limestone, hydrated lime, calcium carbonate, diammonium phosphate, monoammonium phosphate, magnesium nitrate, magnesium sulfate, potassium acetate, potassium nitrate, potassium chloride, potassium magnesium sulfate, potassium phosphate, tribasic potassium phosphate, potassium sulfate, sodium nitrates, magnesian limestone, magnesia, urea, urea-formaldehydes, urea ammonium nitrate, sulfur-coated urea, polymer-coated urea, isobutylidene diurea, K₂SO4-Mg₂SO₄, kainite, sylvinite, kieserite, Epsom salts, elemental sulfur, marl, ground oyster shells, fish meal, oil cakes, fish manure, blood meal, rock phosphate, super phosphates, slag, bone meal, wood ash, manure, bat guano, peat moss, compost, green sand, cottonseed meal, feather meal, crab meal, fish emulsion, humic acid, or any combination thereof.

[0491] The fertilizer can comprise a liquid fertilizer or a dry fertilizer.

[0492] The agrochemical can comprise a micronutrient fertilizer material, the micronutrient fertilizer material comprising boric acid, a borate, a boron frit, copper sulfate, a copper frit, a copper chelate, a sodium tetraborate decahydrate, an iron sulfate, an iron oxide, iron ammonium sulfate, an iron frit, an iron chelate, a manganese sulfate, a manganese oxide, a manganese chelate, a manganese chloride, a manganese frit, a sodium molybdate, molybdic acid, a zinc sulfate, a zinc oxide, a zinc carbonate, a zinc frit, zinc phosphate, a zinc chelate, or any combination thereof.

[0493] The agrochemical can comprise an insecticide, the insecticide comprising an organophosphate, a carbamate, a pyrethroid, an acaricide, an alkyl phthalate, boric acid, a borate, a fluoride, sulfur, a haloaromatic substituted urea, a hydrocarbon ester, a biologically-based insecticide, or any combination thereof.

[0494] When the composition includes a biostimulant, the biostimulant can comprise a seaweed extract, an elicitor, a polysaccharide, a monosaccharide, a protein extract, a soybean extract, a humic acid, a plant hormone, a plant growth regulator, or any combination thereof.

[0495] A variety of colorants can be employed, including organic chromophores classified as nitroso, nitro, azo, including monoazo, bisazo, and polyazo, diphenylmethane, triarylmethane, xanthene, methane, acridine, thiazole, thiazine, indamine, indophenol, azine, oxazine, anthraquinone, phthalocyanine, or any combination thereof.

[0496] The composition can further comprise a carrier.

[0497] The carrier of the composition can include, but is not limited to, water, peat, wheat, bran, vermiculite, clay, pasteurized soil, calcium carbonate, calcium bicarbonate, dolomite, gypsum, bentonite, a clay, a rock phosphate, a phosphorous compound, titanium dioxide, humus, talc, alginate, activated charcoal, or a combination thereof.

[0498] The composition can be in the form of an aqueous solution, a slurry or dispersion, an emulsion, a solid such as a powder or granule, or any other desirable form for applying the composition to a plant or plant part.

[0499] The composition can comprise a majority of the bioactive priming polypeptides and/or inducer compounds with the remainder of the composition being agrochemicals or carriers. More specifically, the composition can comprise from about 0.00001% to about 95% of the polypeptides, from about 0.1 to about 80 wt. % of the agrochemicals, and from about 5 to about 50 wt. % carrier based on the total weight of the composition. Alternatively, the composition can comprise from about 0.01 to about 5 wt. % of the polypeptides, from about 0.2 to about 70 wt. % of the agrochemicals, and from about 10 to about 30 wt. % carrier based on the total weight of the composition, or the composition can comprise from about 0.05 wt. % to about 1 wt. % of the polypeptides, from about 30 to about 60 wt. % of the agrochemicals, and from about 40 to about 69 wt. % carrier based on the total weight of the composition. Alternatively, the composition can comprise any detectable amount of the polypeptides, and from about 0.1 to about 80 wt. % of the agrochemicals and from about 5 to about 50 wt. % of the carrier, based on the total weight of the composition.

[0500] The composition can comprise a majority of agrochemicals or carriers with the remainder being polypeptides and/or inducer compounds. More specifically, the composition can comprise 0.0000005 wt. % to about 10 wt. % of the polypeptide(s), from about 0.01% to about 99 wt. % of the agrochemical distinct from the inducer compound, and from about 1 to about 99.99 wt % carrier, based on the total weight of the composition. Alternatively, the composition can comprise from about 0.001% to about 5% of the polypeptide(s), from about 0.1% to about 70 wt. % of the agrochemical, and from about 25 to about 99.9 wt % carrier based on the total weight of the composition. Even more specifically, the composition can comprise from about 0.005% to about 0.1% of the polypeptide(s), from about 0.1% to about 60 wt. % of the agrochemical, and from about 40 to about 99.8 wt. % carrier based on the total weight of the composition. Alternatively, the composition can comprise any detectable amount of the polypeptides, any detectable amount of the inducer compound, and from about 1 to 99.99 wt. % of the carrier based on the total weight of the composition. In any of these compositions, the composition can comprise from about 0.0000001 wt. % to about 95 wt. % of the inducer compound based on the total weight of the composition. For example, the composition can comprise from about 0.001 wt. % to about 95 wt. % based on the total weight of the composition.

[0501] Even more specifically, the composition can comprise from about 0.00001% to about 95% of the polypeptides, from about 0.000001 wt. % to about 95 wt. % of the inducer compound, from about 0.1 to about 80 wt. % of the agrochemicals, and from about 5 to about 50 wt. % carrier based on the total weight of the composition. Alternatively, the composition can comprise from about 0.01 to about 5 wt. % of the polypeptides, from about 0.000001 wt. % to about 95 wt. % of the inducer compound, from about 0.2 to about 70 wt. % of the agrochemicals, and from about 10 to about 30 wt. % carrier based on the total weight of the composition, or the composition can comprise from about 0.05 wt. % to about 1 wt. % of the polypeptides, from about 0.000001 wt. % to about 95 wt. % of the inducer compound, from about 30 to about 60 wt. % of the agrochemicals, and from about 40 to about 69 wt. % carrier based on the total weight of the composition. Alternatively, the composition can comprise any detectable amount of the polypeptides, and any detectable amount of the inducer compound and from about 0.1 to about 80 wt. % of the agrochemicals and from about 5 to about 50 wt. % of the carrier, based on the total weight of the composition

[0502] When the composition comprises two or more inducer compounds, the composition can comprise from about 0.000001 wt. % to about 95 wt. % of a first inducer and from about 0.000001 wt. % to about 95% wt. % of the second inducer, from about 0.1 to about 80 wt. % of the agrochemicals, and from about 5 to about 50 wt. % carrier based on the total weight of the composition. Alternatively, the composition can comprise from about 0.000001 wt. % to about 95 wt. % of the first inducer and from about 0.001 wt. % of the second inducer, from about 0.1 to about 80 wt. % of the agrochemicals, and from about 5 to about 50 wt. % carrier based on the total weight of the composition. Alternatively, the composition can comprise from about 0.001 wt. % of the first inducer and from about 0.000001 wt. % of the second inducer, from about 0.1 to about 80 wt. % of the agrochemicals, and from about 5 to about 99 wt. % carrier based on the total weight of the composition.

[0503] The inducer compound can comprise from about 0.000001 wt. % to about 95 wt. % of the composition based on the total weight of the composition. Preferably, the inducer compound comprises from about 0.000001 wt. % to about 95 wt. % of the composition based on the total weight of the composition when the inducer compound comprises a callose synthase inhibitor, an amino acid, salicylic acid, oxalic acid, a betaine, a proline, a benzothiadiazole or any combination thereof. The inducer compound can comprise from about 0.001 wt. % to about 95 wt. % based on the total weight of the composition. Preferably, the inducer compound comprises from about 0.001 wt. % to about 95 wt. % based on the total weight of the composition when the inducer compound comprises a bactericide.

[0504] Bioactive priming polypeptides such as the flagellin and flagellin-associated polypeptides, thionin (defensin family), or other growth promoting or altering bioactive priming polypeptides such RHPP, serine proteases, glucanases, amylases, chitinases, or ACC deaminases can be provided as compositions that can either be exogenously and/or endogenously applied to a plant or a plant part and provide enhanced plant growth, productivity and enhanced health of that plant or plant part as described in more detail below.

[0505] The bioactive priming polypeptides can be added separately (in individual compositions) or in combination as a composition that are useful as applications to provide a benefit to plants and/or plant parts.

[0506] In combination, the polypeptides can be formulated and delivered in a purified polypeptide form either as a genetic fusion on the same recombinant vector, or separately using different recombinant vectors.

[0507] The bioactive priming polypeptides can also be created and delivered to a plant or plant part as polypeptides from multiple actives in a fusion protein. Examples of this include delivery of multiple flagellin associated polypeptides produced in series with protease cleavage sites between each polypeptide as is within the skill of one of ordinary skill in the art. Such fusion proteins can include any combination of the bioactive priming polypeptides as described herein, including bioactive priming polypeptides from different classes, such as combinations of flagellin associated polypeptides with RHPP. Bioactive priming polypeptides can also be utilized as protein fusions to plant binding domains, which can direct the polypeptides to distinct locations within the plant where they are most desired or needed for their activities to be beneficial.

[0508] Additionally, the polypeptides can be added to formulations provided in a synthetic compound form.

[0509] The flagellin and flagellin-associated bioactive priming polypeptides as described herein can be provided individually or in combination containing at least two multiple bioactive priming polypeptides to provide a composition that meets the specific needs of a plant over a wide range of desired host responses and cropping systems.

### IV(A) Isolated Polypeptides

[0510] An isolated polypeptide (peptide) is also provided. The isolated polypeptide can enable bioactive priming of a plant or a plant part to increase growth, yield, health, longevity, productivity, and/or vigor of a plant or a plant part and/or decrease abiotic stress in the plant or the plant part and/or protect the plant or the plant part from disease, insects, and/or nematodes, and/or increase the innate immune response of the plant or the plant part and/or change plant architecture. The isolated polypeptide can comprise any of the polypeptides described above in connection with the compositions described herein.

[0511] Further, the isolated polypeptide can comprise a Root Hair Promoting polypeptide (RHPP). The RHPP can comprise or consist of any one of SEQ IDs NOs 745-755 (Tables 11 an 12, above). The RHPP can also comprise or consist of a polypeptide having greater than 70% sequence identity, greater than 75% sequence identity, greater than 80% sequence identity, greater than 85% sequence identity, greater than about 90%, greater than about 91%, greater than about 92%, greater than about 93%, greater than about 94%, greater than about 95%, greater than about 96%, greater than about 97%, greater than about 98%, or greater than about 99% sequence identity to any one of SEQ ID NOs: 745-755.

[0512] The isolated polypeptide can comprise a retro-inverso Root Hair Promoting polypeptide (RI-RHPP). The RI-RHPP can comprise or consist of any one of SEQ ID NOs: 756-766 (Table 13). The RI-RHPP can also comprise or consist of a polypeptide having greater than 70% sequence identity, greater than 75% sequence identity, greater than 80% sequence identity, greater than 85% sequence identity, greater than about 90%, greater than about 91%, greater than about 92%, greater than about 93%, greater than about 94%, greater than about 95%, greater than about 96%, greater than about 97%, greater than about 98%, or greater than about 99% sequence identity to any one of SEQ ID NOs: 756-766.

[0513] The isolated polypeptide can comprise a glucanase, an amylase or a chitinase. For example, the isolated polypeptide can comprise a β-1,3-glucanase, an amylase, or a chitinase. The β-1,3-glucanase can comprise or consist of any one of SEQ ID NOs: 732, 735, and 767-776 (Table 19). The amylase can comprise or consist of any one of SEQ ID NOs: 734 and 735 (Table 19). The chitinase can comprise or consist of SEQ ID NO: 777 or 778 (Table 19). Further, the glucanase, amylase, or chitinase can comprise or consist of a polypeptide having greater than 70% sequence identity, greater than 75% sequence identity, greater than 80% sequence identity, greater than 85% sequence identity, greater than about 90%, greater than about 91%, greater than about 92%, greater than about 93%, greater than about 94%, greater than about 95%, greater than about 96%, greater than about 97%, greater than about 98%, or greater than about 99% sequence identity to any one of SEQ ID NOs: 732, 735, and 767-778.

[0514] Accordingly, the isolated polypeptide can comprise the amino acid sequence of any one of SEQ ID NOs: 732, 735, 746-755 and 757-778; or the polypeptide consists of the amino acid sequence of any one of SEQ ID NOs: 732, 735, 745-778.

[0515] The amino acid sequence of the isolated polypeptide can comprise any one of SEQ ID NOs: 747, 758, 767-769, 771, 772, 773, 775, and 778, or the amino acid sequence of the polypeptide consists of any one of SEQ ID NOs: 747, 758, 767-769, 771, 772, 773, 775, and 778.

[0516] The amino acid sequence of the isolated polypeptide can comprise any one of SEQ ID NOs: 732, 746-750, 757-761, 767-776, and 778, or the amino acid sequence of the polypeptide consists of any one of SEQ ID NOs: 732, 746-750, 757-761, 767-776, and 778.

[0517] The amino acid sequence of the isolated polypeptide can comprise any one of SEQ ID NOs: 732, 746-755, 757-776, and 778, or the amino acid sequence of the polypeptide consists of any one of SEQ ID NOs: 732, 746-755, 757-776, and 778.

[0518] The amino acid sequence of the isolated polypeptide can comprise any one of SEQ ID NOs: 732, 735, 746-755, 757-778, or the amino acid sequence of the polypeptide consists of any one of SEQ ID NOs: 732, 735, 746-755, 757-778.

### IV. Applications

[0519] The agricultural composition, isolated polypeptides, and methods described herein can be used with any species of plant and/or the seeds thereof. The compositions and methods are typically used with seeds that are agronomically important.

[0520] The seed can be a transgenic seed from which a transgenic plant can grow that incorporates a transgenic event that confers, for example, tolerance to a particular herbicide or combination of herbicides, increased disease resistance, enhanced tolerance to insects, drought, stress and/or enhanced yield.

[0521] The seed can comprise a breeding trait, including for example, a disease tolerant breeding trait.

[0522] In some instances, the seed includes at least one transgenic trait and at least one breeding trait.

[0523] The bioactive priming polypeptide compositions and methods for applying the polypeptides can be used for the treatment of any suitable seed type, including, but not limited to, row crops and vegetables. For example, one or more plants or plant parts or the seeds of one or more plants can comprise abaca (manila hemp) (Musa textilis), alfalfa for fodder (Medicago sativa), alfalfa for seed (Medicago sativa), almond (Prunus dulcis), anise seeds (Pimpinella anisum), apple (Malus sylvestris), apricot (Prunus armeniaca), areca (betel nut) (Areca catechu), arracha (Arracacia xanthorrhiza), arrowroot (Maranta arundinacea), artichoke (Cynara scolymus), asparagus (Asparagus officinalis), avocado (Persea americana), bajra (pearl millet) (Pennisetum americanum), bambara groundnut (Vigna subterranea), banana (Musa paradisiaca), barley (Hordeum vulgare), beans, dry, edible, for grains (Phaseolus vulgaris), beans, harvested green (Phaseolus and Vigna spp.), beet, fodder (mangel) (Beta vulgaris), beet, red (Beta vulgaris), beet, sugar (Beta vulgaris), beet, sugar for fodder (Beta vulgaris), beet, sugar for seeds (Beta vulgaris), bergamot (Citrus bergamia), betel nut (Areca catechu), black pepper (Piper nigrum), black wattle (Acacia mearnsii), blackberries of various species (Rubus spp.), blueberry (Vaccinium spp.), Brazil nut (Bertholletia excelsa), breadfruit (Artocarpus altilis), broad bean, dry (Vicia faba), broad bean, harvested green (Vicia faba), broccoli (Brassica oleracea var. botrytis), broom millet (Sorghum bicolor), broom sorghum (Sorghum bicolor), Brussels sprouts (Brassica oleracea var. gemmifera), buckwheat (Fagopyrum esculentum), cabbage, red, white, Savoy (Brassica oleracea var. capitata), cabbage, Chinese (Brassica chinensis), cabbage, for fodder (Brassica spp.), cacao (cocoa) (Theobroma cacao), cantaloupe (Cucumis melo), caraway seeds (Carum carvi), cardamom (Elettaria cardamomum), cardoon (Cynara cardunculus), carob (Ceratonia siliqua), carrot, edible (Daucus carota spp. sativa), carrot, for fodder (Daucus carota sativa), cashew nuts (Anacardium occidentale), cassava (manioc) (Manihot esculenta), castor bean (Ricinus communis), cauliflower (Brassica oleracea var. botrytis), celeriac (Apium graveolens var. rapaceum), celery (Apium graveolens), chayote (Sechium edule), cherry, all varieties (Prunus spp.), chestnut (Castanea sativa), chickpea (gram pea) (Cicer arietinum), chicory (Cichorium intybus), chicory for greens (Cichorium intybus), chili, dry (all varieties) (Capsicum spp. (annuum)), chili, fresh (all varieties) (Capsicum spp. (annuum)), cinnamon (Cinnamomum verum), citrus (all varieties, family Rutaceae), citron (Citrus medica), citronella (Cymbopogon citrates; Cymbopogon nardus), clementine (Citrus reticulata), clove (Eugenia aromatica; Syzygium aromaticum), clover for fodder (all varieties) (Trifolium spp.), clover for seed (all varieties) (Trifolium spp.), cocoa (cacao) (Theobroma cacao), coconut (Cocos nucifera), cocoyam (Colocasia esculenta), coffee (Coffea spp.), cola nut, all varieties (Cola acuminata), colza (rapeseed) (Brassica napus), corn (maize), for cereals (Zea mays), corn (maize), for silage (Zea mays), corn (maize), for vegetable (Zea mays), corn for salad (Valerianella locusta), cotton, all varieties (Gossypium spp.), cottonseed, all varieties (Gossypium spp.), cowpea, for grain (Vigna unguiculata), cowpea, harvested green (Vigna unguiculata), cranberry (Vaccinium spp.), cress (Lepidium sativum), cucumber (Cucumis sativus), currants, all varieties (Ribes spp.), custard apple (Annona reticulate), dasheen (Colocasia esculenta), dates (Phoenix dactylifera), drumstick tree (Moringa oleifera), durra (sorghum) (Sorghum bicolour), durum wheat (Triticum durum), earth pea (Vigna subterranea), edo (eddoe) (Xanthosoma spp.; Colocasia spp.), eggplant (Solanum melongena), endive (Cichorium endivia), fennel (Foeniculum vulgare), fenugreek (Trigonella foenum-graecum), fig (Ficus carica), filbert (hazelnut) (Corylus avellana), fique (Furcraea macrophylla), flax for fiber (Linum usitatissimum), flax for oil seed (linseed) (Linum usitatissimum), formio (New Zealand flax) (Phormium tenax), garlic, dry (Allium sativum), garlic, green (Allium sativum), geranium (Pelargonium spp.; Geranium spp.), ginger (Zingiber officinale), gooseberry, all varieties (Ribes spp.), gourd (Lagenaria spp; Cucurbita spp.), gram pea (chickpea) (Cicer arietinum), grapes for raisins (Vitis vinifera), grapes for table use (Vitis vinifera), grapes for wine (Vitis vinifera), grapefruit (Citrus paradisi), grass esparto (Lygeum spartum), grass, orchard (Dactylis glomerata), grass, Sudan (Sorghum bicolor var. sudanense), groundnut (peanut) (Arachis hypogaea), guava (Psidium guajava), guinea corn (sorghum) (Sorghum bicolor), hazelnut (filbert) (Corylus avellana), hemp fiber (Cannabis sativa spp. indica), hemp, manila (abaca) (Musa textilis), hemp, sun (Crotalaria juncea), hempseed (marijuana) (Cannabis sativa), henequen (Agave fourcroydes), henna (Lawsonia inermis), hop (Humulus lupulus), horse bean (Vicia faba), horseradish (Armoracia rusticana), hybrid maize (Zea mays), indigo (Indigofera tinctoria), jasmine (Jasminum spp.), Jerusalem artichoke (Helianthus tuberosus), jowar (sorghum) (Sorghum bicolor), jute (Corchorus spp.), kale (Brassica oleracea var. acephala), kapok (Ceiba pentandra), kenaf (Hibiscus cannabinus), kiwi or kiwifruit (Actinidia deliciosa), kohlrabi (Brassica oleracea var. gongylodes), lavender (Lavandula spp.), leek (Allium ampeloprasum; Allium porrum), lemon (Citrus limon), lemongrass (Cymbopogon citratus), lentil (Lens culinaris), lespedeza, all varieties (Lespedeza spp.), lettuce (Lactuca sativa var. capitata), lime, sour (Citrus aurantifolia), lime, sweet (Citrus limetta), linseed (flax for oil seed) (Linum usitatissimum), licorice (Glycyrrhiza glabra), litchi (Litchi chinensis), loquat (Eriobotrya japonica), lupine, all varieties (Lupinus spp.), Macadamia (Queensland nut) (Macadamia spp. ternifolia), mace (Myristica fragrans), maguey (Agave atrovirens), maize (corn) (Zea mays), maize (corn) for silage (Zea mays), maize (hybrid) (Zea mays), maize, ordinary (Zea mays), mandarin (Citrus reticulata), mangel (fodder beet) (Beta vulgaris), mango (Mangifera indica), manioc (cassava) (Manihot esculenta), maslin (mixed cereals) (mixture of Triticum spp. and Secale cereale), medlar (Mespilus germanica), melon, except watermelon (Cucumis melo), millet broom (Sorghum bicolor), millet, bajra (Pennisetum americanum), bulrush (Pennisetum americanum), millet, finger (Eleusine coracana), millet (Urochola ramosa), foxtail (Setaria italica), millet, Japanese (Echinochloa esculenta), millet, pearl (bajra, bulrush) (Pennisetum americanum), millet, proso (Panicum miliaceum), mint, all varieties (Mentha spp.), mulberry for fruit, all varieties (Morus spp.), mulberry for silkworms (Morus alba), mushrooms (Agaricus spp.; Pleurotus spp.; Volvariella), mustard (Brassica nigra; Sinapis alba), nectarine (Prunus persica var. nectarina), New Zealand flax (formio) (Phormium tenax), Niger seed (Guizotia abyssinica), nutmeg (Myristica fragrans), oats, for fodder (Avena spp.), oil palm (Elaeis guineensis), okra (Abelmoschus esculentus), olive (Olea europaea), onion seed (Allium cepa), onion, dry (Allium cepa), onion, green (Allium cepa), opium (Papaver somniferum), orange (Citrus sinensis), orange, bitter (Citrus aurantium), ornamental plants (various), palm palmyra (Borassus flabellifer), palm (Arecaceae), palm kernel oil (Elaeis guineensis), palm, oil (Elaeis guineensis), palm, sago (Metroxylon sagu), papaya (pawpaw) (Carica papaya), parsnip (Pastinaca sativa), pea, edible dry, for grain (Pisum sativum), pea, harvested green (Pisum sativum), peach (Prunus persica), peanut (groundnut) (Arachis hypogaea), pear (Pyrus communis), pecan nut (Carya illinoensis), pepper, black (Piper nigrum), pepper, dry (Capsicum spp.), persimmon (Diospyros kaki; Diospyros virginiana), pigeon pea (Cajanus cajan), pineapple (Ananas comosus), pistachio nut (Pistacia vera), plantain (Musa sapientum), plum (Prunus domestica), pomegranate (Punica granatum), pomelo (Citrus grandis), poppy seed (Papaver somniferum), potato (Solamum tuberosum), potato, sweet (Ipomoea batatas), prune (Prunus domestica), pumpkin, edible (Cucurbita spp.), pumpkin, for fodder (Cucurbita spp.), pyrethum (Chrysanthemum cinerariaefolium), quebracho (Aspidosperma spp.), Queensland nut (Macadamia spp. ternifolia), quince (Cydonia oblonga), quinine (Cinchona spp.), quinoa (Chenopodium quinoa), ramie (Boehmeria nivea), rapeseed (colza) (Brassica napus), raspberry, all varieties (Rubus spp.), red beet (Beta vulgaris), redtop (Agrostis spp.), rhea (Boehmeria nivea), rhubarb (Rheum spp.), rice (Oryza sativa; Oryza glaberrima), rose (Rose spp.), rubber (Hevea brasiliensis), rutabaga (swede) (Brassica napus var. napobrassica), rye (Secale cereale), ryegrass seed (Lolium spp.), safflower (Carthamus tinctorius), sainfoin (Onobrychis viciifolia), salsify (Tragopogon porrifolius), sapodilla (Achras sapota), satsuma (mandarin/tangerine) (Citrus reticulata), scorzonera (black salsify) (Scorzonera hispanica), sesame (Sesamum indicum), shea butter (nut) (Vitellaria paradoxa), sisal (Agave sisalana), sorghum (Sorghum bicolor), sorghum, broom (Sorghum bicolor), sorghum, durra (Sorghum bicolor), sorghum, guinea corn (Sorghum bicolor), sorghum, jowar (Sorghum bicolor), sorghum, sweet (Sorghum bicolor), soybean (Glycine max), soybean hay (Glycine max), spelt wheat (Triticum spelta), spinach (Spinacia oleracea), squash (Cucurbita spp.), strawberry (Fragaria spp.), sugar beet (Beta vulgaris), sugar beet for fodder (Beta vulgaris), sugar beet for seed (Beta vulgaris), sugarcane for fodder (Saccharum officinarum), sugarcane for sugar or alcohol (Saccharum officinarum), sugarcane for thatching (Saccharum officinarum), sunflower for fodder (Helianthus annuus), sunflower for oil seed (Helianthus annuus), sunhemp (Crotalaria juncea), swede (Brassica napus var. napobrassica), swede for fodder (Brassica napus var. napobrassica), sweet corn (Zea mays), sweet lime (Citrus limetta), sweet pepper (Capsicum annuum), sweet potato (Lopmoea batatas), sweet sorghum (Sorghum bicolor), tangerine (Citrus reticulata), tannia (Xanthosoma sagittifolium), tapioca (cassava) (Manihot esculenta), taro (Colocasia esculenta), tea (Camellia sinensis), teff (Eragrostis abyssinica), timothy (Phleum pratense), tobacco (Nicotiana tabacum), tomato (Lycopersicon esculentum), trefoil (Lotus spp.), triticale, for fodder (hybrid of Triticum aestivum and Secale cereale), tung tree (Aleurites spp.; Fordii), turnip, edible (Brassica rapa), turnip, for fodder (Brassica rapa), urena (Congo jute) (Urena lobata), vanilla (Vanilla planifolia), vetch, for grain (Vicia sativa), walnut (Juglans spp., especially Juglans regia), watermelon (Citrullus lanatus), wheat (Triticum aestivum), yam (Dioscorea spp.), or yerba mate (Ilex paraguariensis).

[0524] The isolated polypeptides and compositions disclosed herein can also be applied to turf grass, ornamental grass, flowers, ornamentals, trees, horticultural plants, and shrubs.

[0525] The isolated polypeptides and compositions comprising the bioactive priming polypeptides are also suitable for use in the nursery, lawn and garden, floriculture, horticulture or the cut flower industry and provide benefits for enhanced plant productivity, protection health, vigor and longevity. For example, they can be applied to perennials, annuals, forced bulbs, or pseudo bulbs, herbs, groundcovers, trees, shrubs, ornamentals (e.g., orchids, etc.), tropical plants, vines and nursery stock.

[0526] The isolated polypeptides and compositions comprising the bioactive priming polypeptides and/or inducer compounds described herein are suitable for treating plants, plant parts and plant propagation material(s), for example, any plant or plant part, such as seeds, roots, stems, vascular system (e.g., phloem and xylem), floral organs, root stocks, scions, bulb, pseudobulbs, rhizomes, tubers, etc. The compositions comprising the bioactive priming polypeptides and/or inducer compounds described herein can be applied to the soil surrounding the plant (e.g., in furrow).

[0527] The isolated polypeptides and bioactive priming compositions can be applied as seed treatments to treat for a number of pests, diseases, nutrient deficiencies while enhancing plant growth and productivity.

[0528] Seed coating or dressing compositions can be, for example, a liquid carrier composition, a slurry composition, or a powder composition applied with conventional additives that are provided to make the seed treatment have sticky qualities to stick to and coat the seeds. Suitable additives for a seed composition comprise: talcs, graphites, gums, stabilizing polymers, coating polymers, finishing polymers, slip agents for seed flow and plantability, cosmetic agents and cellulosic materials such as carboxymethyl cellulose and the like. The bioactive priming polypeptide seed treatments can further comprise colorant agents and other such additives.

[0529] The bioactive priming compositions can be applied individually as seed treatments or in combination with other additives such as fungicides, insecticides, inoculants, plant growth regulators, plant growth promoting microbes, fertilizers and fertilizer enhancers, seed nutrients, biological control agents, herbicidal antidotes and seedling disease treatments and with other conventional seed treatments.

[0530] The seed treatment composition as described herein can be applied to seeds in a suitable carrier such as water or a powder that is not harmful to the seeds or the environment. The seeds are then planted in conventional fashion.

[0531] Preferred seed treatments such as Bt.4Q7Flg22 (SEQ ID NO: 226 or SEQ ID NO: 571), Ec.Flg22 (SEQ ID NO: 526) and Gm.RHPP (SEQ ID NO: 604) are useful to enhance seedling development, decrease the time for germination, increase the number of seeds that germinate, and enhance seedling survivability. In addition, the seed treatment compositions enhance seed protection from microbial-based diseases which are known to contact the seed or the soil surrounding the seed and spread during early seedling establishment.

[0532] The seed treatment composition can comprise a polypeptide and/or an inducer compound as described herein and a fungicide, an insecticide, a nematocide, a biological control agent, a biostimulant, a microbe, or any combination thereof

[0533] The seed treatment composition can comprise a polypeptide and/or an inducer compound as described herein and clothianidin, Bacillus firmus, metalaxyl, or any combination thereof.

[0534] The seed treatment composition can comprise a polypeptide and/or an inducer compound as described herein, clothianidin and fluopyram.

[0535] The seed treatment can comprise a polypeptide and/or an inducer compound as described herein, metalaxyl and fluopyram.

[0536] The bioactive priming compositions described herein can be applied directly to the seed as a solution or in combination with other commercially available additives. Solutions containing the water-soluble polypeptide can be sprayed or otherwise applied to the seed as a seed slurry or a seed soak. Solids or dry materials containing soluble bioactive priming polypeptides are also useful to promote effective seedling germination, growth and protection during early seedling establishment.

[0537] The bioactive priming compositions described herein can be formulated with a solubilizing carrier such as water, buffer (e.g., citrate or phosphate buffer) and other treating agents (e.g., alcohol, other solvents) or any solubilizing agent. In addition, small amounts of drying agent enhancers, such as lower alcohols, etc. can be utilized in the composition. Surfactants, emulsifiers and preservatives can also be added at small (0.5% v/v or less) levels in order to enhance the stability of the seed coating product.

[0538] Seed treatments containing the bioactive priming compositions herein can be applied using any commercially available seed treatment machinery or can also be applied using any acceptable non-commercial method(s) such as the use of syringes or any other seed treatment device. General seed treatments coating procedures using bioactive priming polypeptides can be performed using a Wintersteiger HEGE 11 (Wintersteiger AG, Austria, Germany) and applied to the seed of major crops, namely corn, soybean, wheat, rice and various vegetables. The capacity of this seed treatment machinery can accommodate a large number of different seed types, sizes and amounts of seed (20-3000 grams). The seed is loaded into bowls of the seed treater machinery. The bowl selection depends on the treatment seed amount required and the size of the bowl selected: large 14.5 L bowl (500-3000 g seed per coating); medium 7 L bowl (80-800 g seed per coating); and small 1 L bowl (20-100 g seed per coating). Other larger seed treatment systems are also available.

[0539] The seed is distributed toward the radial peripheries of the rotatable bowls via an application of centrifugal force with the centrifugal coating device. The spinning disc located at the bottom of the bowl distributes the seed treatment evenly over the seed. At this point, the spin cycle is started which causes the seeds to revolve around the bowl center in a circle to evenly coat the seeds. The process of seed treatment coating is initiated after the seed is evenly dispersed around the spreader. Seed treatment sample material (such as a powdered, semi-liquid, liquid or a slurry) can be applied onto the rotatable disk as the disks are spinning within the rotatable bowls used to distribute the seed treatment evenly to provide a uniform coat and dress the surface of the seed.

[0540] A constant air flow delivered using compressed air (2-6 bars) can be provided during seed coating to assist with uniformly coating the seeds in the bowl. The amount of time for the coating of the seed depends on the amount of the seed, the viscosity of the seed treatment and the type of the seed used in the treatment. A seed treatment calculator is used to adjust for all volumes, for most major and commercially grown crops and the type of seed treatment being applied.

[0541] The seeds can be coated using a variety of methods including, but not limited to, pouring or pumping, drizzling or spraying an aqueous solution containing the bioactive priming polypeptides on or over a seed, spraying or applying onto a layer of seeds either with the use or without the use of a conveyor system. Suitable mixing devices include tumblers, mixing basins or drums, or other fluid applicating devices that include basins or drums used to contain the seed while coating.

[0542] After the seed has been treated and dried, the seeds are distributed into a larger storage container(s). Seeds are either air dried or dried with a continuous air stream that passes over the seeds. Seeds are then transferred into a separate container or bag for shipment, transfer or storage.

[0543] The bioactive priming compositions or isolated polypeptides can further be provided for delivery to a plant surface or plant plasma membrane as a foliar spray or a seed treatment to an area surrounding a plant or a plant part.

[0544] The bioactive priming compositions or isolated polypeptides can also be provided as a seed treatment application or on a matrix such as immobilized or impregnated on a particle, or a granule such as used in a broadcast treatment.

[0545] The bioactive priming compositions or isolated polypeptides as described herein can be applied to plants and plant parts using an exogenous application as a spray, soil treatment, in furrow, seed treatment, dip or wash or as an endogenous application as an injection, inoculation, irrigation, infiltration, etc.

[0546] The isolated polypeptides or compositions comprising polypeptides and/or an inducer compound can be applied directly to a plant or to the area surrounding a plant or plant part.

[0547] They can also be provided on a matrix material which is then provided to a plant or plant part.

[0548] The compositions containing the flagellin-associated bioactive priming polypeptides and/or inducer compounds can also be provided for direct delivery into a plant, plant tissues or a plant cell by various delivery methods, for example, injection, inoculation or infiltration (for example, infiltration into the stomata on the leaf). These polypeptides can also be provided in a manner where they can move systemically through a plant and influence signaling cascades in the plant that subsequently produce beneficial and productive outcomes to the plant or plant part.

[0549] The isolated polypeptides or bioactive priming composition described herein, can be provided for direct delivery into a plant, plant tissues, or a plant cell by an endogenous application. For example, the isolated polypeptides and/or bioactive priming compositions can be directly injected into a plant. Preferably, the injection allows direct delivery of the isolated polypeptide or the composition into the vascular system of the plant (e.g., into the phloem or xylem). In some cases, the isolated polypeptide delivered by direct injection into the vascular system of the plant comprises a glucanase (e.g., a β-1,3-glucanase).

[0550] Retro-inverso Flg bioactive priming polypeptides as described in Table 4 or Table 5 can be applied individually or in combination with any other flagellin, flagellin-associated or other bioactive priming polypeptide sequences as described herein. Combinations of such RI flagellin and flagellin-associated bioactive priming polypeptides are useful as plant protectants as well as plant growth promoting enhancers.

[0551] The signature (SEQ ID NO: 542-548; Table 6), signal anchor sorting (SEQ ID NO: 549-562, Table 7) and secretion assistance polypeptides (SEQ ID NOs 563-570; Table 8) can be used in combination with any of the flagellin coding (Table 1), N and/or C-terminal conserved sequences from Bacillus-derived flagellins (Table 2), flagellin-associated polypeptides: Flg22 and FlgII-28 (Table 3), the retro inverso forms of Flg22 and FlgII-28 (Table 4) or any of the other Flgs (Table 5) as described herein.

[0552] For example, any of the Flg-associated bioactive priming polypeptides or combinations (compositions) thereof can be provided in individual formulations and applied either simultaneously, sequentially in separate formulations or provided as fusion protein(s) that contain the assistance sequences as described in Tables 6-8 and applied directly or separately to a plant or plant part.

[0553] Compositions comprising a flagellin or flagellin-associated polypeptide and an inducer compound can be used to improved disease symptoms or pathogen titer in a plant (particularly in citrus plants). For example, compositions described herein can prevent or reduce callose deposition in or around phloem plasmodesmata that occurs in CLas infeted citrus plants. They can also decrease fruit drop caused by such infections.

[0554] Compositions comprising the flagellin or flagellin-associated polypeptides and an inducer compound described herein are also efficient at improving juice quality and/or quantity from citrus plants.

[0555] Compositions described herein can also be used to improve yield in a row crop (e.g., soybeans or corn).

[0556] Compositions comprising at least one proline, betaine or an ACC deaminase can also beneficially reduce abiotic stress in a plant or plant part.

[0557] Compositions comprising a glucanase and a serine protease can also beneficially reduce mold and/or prevent fungal spore germination on a fruit. In some cases, compositions comprising a glucanase and a serine protease can be applied as a fruit wash to the exterior of a fruit.

[0558] Compositions comprising oxytetracycline and 2-deoxy-D-glucose can beneficially increase fruit yield, fruit size and juice quality.

[0559] Compositions comprising a flagellin or flagellin associated polypeptide (e.g., SEQ ID NO: 226) and an ACC deaminase can beneficially increase yield of a crop.

[0560] Compositions comprising a β-1,3-glucanase can beneficially improve health and vigor of a plant (i.e., a citrus tree), particularly when injected into the trunk of the tree. The β-1,3-glucanase can be injected as an isolated polypeptide or as a composition described herein.

### V. Methods of Use

[0561] Methods are provided for increasing growth, yield, health, longevity, productivity, and/or vigor of a plant or a plant part and/or protecting the plant or the plant part from disease, and/or increasing the innate immune response of the plant or the plant part. The method can comprise applying the compositions as described herein to a plant, a plant part, or a plant growth medium from which the plant will be grown or a rhizosphere in an area surrounding the plant or the plant part to increase growth, yield, health, longevity, productivity, and/or vigor of the plant or the plant part and/or protect the plant or the plant part from disease, and/or increase the innate immune response of the plant or the plant part.

[0562] Another method is provided for increasing juice content and/or improving juice, sugar or acid content and/or improving a Brix:acid ratio of juice obtained from a plant, the method comprising applying any composition described herein to the plant or plant part, or plant growth medium in which the plant will be grown, or a rhizosphere in an area surrounding the plant or plant part to increase juice content and/or improve juice, sugar or acid content or improve a brix:acid ratio of juice obtained from the plant or plant part.

[0563] Methods using the bioactive priming compositions are also provided to increase the overall plant productivity in a field, orchard, planting bed, nursery, timberland, farm, lawn, garden, garden center or acreage. Applications and methods using the bioactive priming compositions are also useful for increasing plant growth, health and productivity in diverse crops (monocots and dicots), for example, corn, wheat, rice, sugarcane, soybean, sorghum, potatoes and a variety of vegetables.

[0564] A “bioactive priming” approach is also provided by direct application of the compositions, which can be applied either exogenously to a plant cell surface or endogenously to the interior of a plant and/or a plant cell. The compositions are provided for delivery to the plant surface or plasma cell membrane or to the interior of a plant, plant tissue or cell and are useful for regulating developmental processes that result in enhanced growth phenotypes such as increases in overall biomass, vegetative growth, seed fill, seed size, and number of seed that contribute to increases in the total yield of crop plants.

[0565] Application of the retro-inverso Flg polypeptides provided in agricultural formulations can result in enhanced plant protection from diseases and abiotic stresses while synergistically enhancing growth, productivity and yield while maintaining increased plant health with enhanced plant performance for longer periods of time.

[0566] Selection of the native L (Table 3) or the retro-inverso D (Table 4) forms of the Flg-associated polypeptides can depend on the environment, the plant/crop, or the combination of plant/crop and environment. In addition, the timing of the treatment application (for example, a foliar spray application) during the growing season are all relevant considerations. The retro inverso Flg bioactive priming polypeptides have enhanced binding affinity to cell surface membranes. Due to these features, the RI forms of the Flg bioactive priming polypeptides can be used to improve abiotic stress tolerance in a plant or plant part.

[0567] Additionally, the retro inverso forms of RI Ec.Flg22 and RI Bt.4Q7Flg22 can be useful to stimulate the closure of stomata under conditions of drought and heat stress and improve yields under those conditions. Control of stomatal closure using Flg-associated bioactive priming polypeptide applied to a plant during periods of environmental stress can assist in the regulation of water loss and stabilize turgor pressure in a plant when environmental conditions are unfavorable.

[0568] In the methods for increasing growth, yield, health, longevity, productivity, and/or vigor of a plant or a plant part and/or protecting the plant or the plant part from disease, and/or increasing the innate immune response of the plant or the plant part, the composition preferably comprises (A) at least one bioactive priming polypeptide and an inducer compound or (B) at least two bioactive priming polypeptides, optionally, with an inducer compound wherein: the polypeptide or polypeptides of (A) or (B) comprise: (i) a flagellin or flagellin-associated polypeptide; or (ii) a retro inverso flagellin or flagellin-associated polypeptide (iii) a root hair promoting polypeptide (RHPP); or (iv) a retro inverso root hair promoting polypeptide (RI RHPP); or (v) a thionin or thionin-like polypeptide; or (vi) a glucanase polypeptide; or (vii) a serine protease polypeptide; or (viii) an ACC deaminase (1-aminocyclopropane-1-carboxylate deaminase) polypeptide; or (ix) an amylase; or (x) a chitinase; or (xi) any combination thereof, with the provisos that:
[0569] (1) the inducer compound comprises a callose synthase inhibitor, β amino butyric acid (BABA), a betaine, a proline, a benzothiazole, salicylic acid, oxalic acid, a succinate dehydrogenase inhibitor, or any combination thereof when the polypeptide of (A) comprises any polypeptide from groups (i)-(v) but not polypeptides selected from the groups (vi) to (x); and
[0570] (2) the inducer compound comprises a bacteriocide, an amino acid or isomer thereof, a callose synthase inhibitor, a substituted or unsubstituted benzoic acid or derivative thereof, a dicarboxylic acid or a derivative thereof, a betaine, a succinate dehydrogenase inhibitor, or any combination thereof when the polypeptide of (A) comprises any polypeptide from groups (vi) to (x); and
[0571] (3) the composition comprises the inducer compound and the inducer compound comprises a callose synthase inhibitor, beta amino butyric acid (BABA), a betaine, a proline, a benzothiazole, salicylic acid, oxalic acid, a succinate dehydrogenase inhibitor, or any combination thereof when the two or more polypeptides of (B) comprise polypeptides selected from groups (i)-(v) but not polypeptides selected from the groups (vi) to (x).

[0572] In the methods for increasing growth, yield, health, longevity, productivity, and/or vigor of a plant or a plant part and/or protecting the plant or the plant part from disease, and/or increasing the innate immune response of the plant or the plant part, the composition can comprise an inducer compound comprising a callose synthase inhibitor, β-amino butyric acid (BABA), a betaine, a proline, salicylic acid, oxalic acid, a succinate dehydrogenase inhibitor, or any combination thereof when the polypeptide of (A) comprises any polypeptide from groups (i)-(v) but not polypeptides selected from the groups (vi) to (x).

[0573] In the methods for increasing growth, yield, health, longevity, productivity, and/or vigor of a plant or a plant part and/or protecting the plant or the plant part from disease, and/or increasing the innate immune response of the plant or the plant part, the composition can comprise an inducer compound comprising a callose synthase inhibitor, β-amino butyric acid (BABA), salicylic acid, oxalic acid, a succinate dehydrogenase inhibitor, or any combination thereof when the polypeptide of (A) comprises any polypeptide from groups (i)-(v) but not polypeptides selected from the groups (vi) to (x).

[0574] In the methods for increasing growth, yield, health, longevity, productivity, and/or vigor of a plant or a plant part and/or protecting the plant or the plant part from disease, and/or increasing the innate immune response of the plant or the plant part, the composition can comprise an inducer compound comprising a callose synthase inhibitor, β-amino butyric acid (BABA), a succinate dehydrogenase inhibitor, or any combination thereof when the polypeptide of (A) comprises any polypeptide from groups (i)-(v) but not polypeptides selected from the groups (vi) to (x).

[0575] In the methods for increasing growth, yield, health, longevity, productivity, and/or vigor of a plant or a plant part and/or protecting the plant or the plant part from disease, and/or increasing the innate immune response of the plant or the plant part, the composition can comprise an inducer compound comprising a betaine or a proline when the polypeptide of (A) comprises any polypeptide from groups (i)-(v) but not polypeptides selected from the groups (vi) to (x).

[0576] In the methods for increasing growth, yield, health, longevity, productivity, and/or vigor of a plant or a plant part and/or protecting the plant or the plant part from disease, and/or increasing the innate immune response of the plant or the plant part, the composition can comprise an inducer compound comprising salicylic acid or oxalic acid when the polypeptide of (A) comprises any polypeptide from groups (i)-(v) but not polypeptides selected from the groups (vi) to (x).

[0577] Alternatively, in the methods for increasing growth, yield, health, longevity, productivity, and/or vigor of a plant or a plant part and/or protecting the plant or the plant part from disease, and/or increasing the innate immune response of the plant or the plant part, the composition can comprise an inducer compound comprising a callose synthase inhibitor, β-amino butyric acid (BABA), a betaine, a proline, salicylic acid, oxalic acid, a succinate dehydrogenase inhibitor, or any combination thereof when the two or more polypeptides of (B) comprise polypeptides selected from groups (i)-(v) but not polypeptides selected from the groups (vi) to (x).

[0578] Alternatively, in the methods for increasing growth, yield, health, longevity, productivity, and/or vigor of a plant or a plant part and/or protecting the plant or the plant part from disease, and/or increasing the innate immune response of the plant or the plant part, the composition can comprise an inducer compound comprising a callose synthase inhibitor, β-amino butyric acid (BABA), salicylic acid, oxalic acid, a succinate dehydrogenase inhibitor, or any combination thereof when the two or more polypeptides of (B) comprise polypeptides selected from groups (i)-(v) but not polypeptides selected from the groups (vi) to (x).

[0579] Alternatively, in the methods for increasing growth, yield, health, longevity, productivity, and/or vigor of a plant or a plant part and/or protecting the plant or the plant part from disease, and/or increasing the innate immune response of the plant or the plant part, the composition can comprise an inducer compound comprising a callose synthase inhibitor, β-amino butyric acid (BABA), or any combination thereof when the two or more polypeptides of (B) comprise polypeptides selected from groups (i)-(v) but not polypeptides selected from the groups (vi) to (x).

[0580] Alternatively, in the methods for increasing growth, yield, health, longevity, productivity, and/or vigor of a plant or a plant part and/or protecting the plant or the plant part from disease, and/or increasing the innate immune response of the plant or the plant part, the composition can comprise an inducer compound comprising a betaine or a proline when the two or more polypeptides of (B) comprise polypeptides selected from groups (i)-(v) but not polypeptides selected from the groups (vi) to (x).

[0581] Alternatively, in the methods for increasing growth, yield, health, longevity, productivity, and/or vigor of a plant or a plant part and/or protecting the plant or the plant part from disease, and/or increasing the innate immune response of the plant or the plant part, the composition can comprise an inducer compound comprising salicylic acid or oxalic acid when the two or more polypeptides of (B) comprise polypeptides selected from groups (i)-(v) but not polypeptides selected from the groups (vi) to (x).

[0582] Alternatively in the methods for increasing growth, yield, health, longevity, productivity, and/or vigor of a plant or a plant part and/or protecting the plant or the plant part from disease, and/or increasing the innate immune response of the plant or the plant part, the composition can comprise a polypeptide selected from groups (i) to (x) and at least one inducer compound comprising a succinate dehydrogenase inhibitor.

[0583] Alternatively in the methods for increasing growth, yield, health, longevity, productivity, and/or vigor of a plant or a plant part and/or protecting the plant or the plant part from disease, and/or increasing the innate immune response of the plant or the plant part, the composition can comprise a callose synthase inhibitor and at least one inducer compound comprising a bacteriocide, an amino acid, substituted or unsubstituted benzoic acid or derivative or salt thereof, a dicarboxylic acid or derivative or salt thereof, a betaine, a proline, a benzothiadiazole, a succinate dehydrogenase inhibitor or any combination thereof. Preferably, the callose synthase inhibitor is 2-DDG. The bacteriocide can be oxytetracycline. The substituted benzoic acid can be salicylic acid. The dicarboxylic acid can be oxalic acid.

[0584] Alternatively, in the methods for increasing growth, yield, health, longevity, productivity, and/or vigor of a plant or a plant part and/or protecting the plant or the plant part from disease, and/or increasing the innate immune response of the plant or the plant part, the composition can comprise a bacteriocide and at least one inducer compound comprising of a β-amino butyric acid (BABA), a betaine, a proline, a benzothiadiazole, salicylic acid, oxalic acid, a succinate dehydrogenase inhibitor or any combination thereof. The bacteriocide can be oxytetracycline.

[0585] Alternatively, in the methods for increasing growth, yield, health, longevity, productivity, and/or vigor of a plant or a plant part and/or protecting the plant or the plant part from disease, and/or increasing the innate immune response of the plant or the plant part, the composition can comprise a bacteriocide and at least one of a callose synthase inhibitor, β amino butyric acid (BABA), a proline, a betaine, salicylic acid, a succinate dehydrogenase inhibitor, or oxalic acid. The callose synthase inhibitor can be 2-DDG. The bacteriocide can be oxytetracycline.

[0586] Alternatively, in the methods for increasing growth, yield, health, longevity, productivity, and/or vigor of a plant or a plant part and/or protecting the plant or the plant part from disease, and/or increasing the innate immune response of the plant or the plant part, the composition can comprise a bacteriocide and at least one of a callose synthase inhibitor, β amino butyric acid (BABA), salicylic acid, a succinate dehydrogenase or oxalic acid. The callose synthase inhibitor can be 2-DDG. The bacteriocide can be oxytetracycline. The succinate dehydrogenase can be bixafen.

[0587] Alternatively, in the methods for increasing growth, yield, health, longevity, productivity, and/or vigor of a plant or a plant part and/or protecting the plant or the plant part from disease, and/or increasing the innate immune response of the plant or the plant part, the composition can comprise a bacteriocide and a callose synthase inhibitor or β amino butyric acid (BABA). The callose synthase inhibitor can be 2-DDG. The bacteriocide can be oxytetracycline.

[0588] Alternatively, in the methods for increasing growth, yield, health, longevity, productivity, and/or vigor of a plant or plant part and/or protecting the plant or the plant part from disease and/or increasing the innate immune response of the plant or plant part, the method can comprise applying an isolated polypeptide to the plant or plant part. The isolated polypeptide can comprise a β-1,3-glucanase. Preferably, when the isolated polypeptide comprises a β-1,3-glucanase, the peptide is injected into a trunk of a plant. The isolated polypeptide can comprise an RHPP, a retro-inverso RHPP, a glucanase, a chitinase and/or an amylase as described herein. For example, the isolated polypeptide can comprise an RHPP having an amino acid sequence comprising or consisting of any one of SEQ ID NOs: 745-755, or a retro-inverso RHPP having an amino acid sequence comprising or consisting of any one of SEQ ID NOs: 756-766, a β-1,3-glucanase having an amino acid sequence comprising any one of SEQ ID NOs: 732 and 767-776, a chitinase having an amino acid sequence comprising any one of SEQ ID NOs: 777 and 778 or an amylase having an amino acid sequence comprising or consisting of SEQ ID NO: 735.

[0589] In the methods for increasing juice content and/or improving a Brix:acid ratio of juice obtained from a plant the composition can comprise (A) at least one polypeptide and an inducer compound; (B) at least two polypeptides, optionally, with an inducer compound; or (C) a callose synthase inhibitor and at least one of an inducer compound comprising a bacteriocide, an amino acid or isomer thereof, a substituted or unsubstituted benzoic acid or derivative or salt thereof, a dicarboxylic acid or derivative or salt thereof, a benzothiadiazole, a betaine, a proline or any combination thereof; or (D) a bacteriocide and at least one of an inducer compound selected from an amino acid or isomer thereof, a callose synthase inhibitor, a substituted or unsubstituted benzoic acid or derivative thereof, a dicarboxylic acid or derivative thereof, a betaine, a proline, a benzothiadiazole or any combination thereof; wherein: the polypeptide or polypeptides of (A) or (B) comprise: (i) a flagellin or flagellin-associated polypeptide; or (ii) a retro inverso flagellin or flagellin-associated polypeptide (iii) a root hair promoting polypeptide (RHPP); or (iv) a retro inverso root hair promoting polypeptide (RI RHPP); or (v) a thionin or thionin-like polypeptide; or (vi) a glucanase polypeptide; or (vii) a serine protease polypeptide; or (viii) an ACC deaminase (1-aminocyclopropane-1-carboxylate deaminase) polypeptide; or (ix) an amylase; or (x) a chitinase; or (xi) any combination thereof.

[0590] In addition, in the methods for increasing juice content and/or improving a Brix:acid ratio of juice obtained from a plant, the method can comprise applying an isolated polypeptide to the plant or plant part. The isolated polypeptide can comprise a β-1,3-glucanase. Preferably, when the isolated polypeptide comprises a β-1,3-glucanase, the peptide is injected into a trunk of a plant. The isolated polypeptide can comprise an RHPP, a retro-inverso RHPP, a glucanase, a chitinase and/or an amylase as described herein. For example, the isolated polypeptide can comprise an RHPP having an amino acid sequence comprising any one of SEQ ID NOs: 745-755, or a retro-inverso RHPP having an amino acid sequence comprising or consisting of any one of SEQ ID NOs: 756-766, a β-1,3-glucanase having an amino acid sequence comprising any one of SEQ ID NOs: 732 and 767-776, a chitinase having an amino acid sequence comprising any one of SEQ ID NOs: 777 and 778 or an amylase having an amino acid sequence comprising or consisting of SEQ ID NO: 735.

Methods for Increasing Growth, Vigor of a Plant and/or Protecting the Plant from a Disease:

[0591] In the methods for increasing growth, yield, health, longevity, productivity, and/or vigor of a plant or a plant part and/or protecting the plant or the plant part from disease, and/or increasing the innate immune response of the plant or the plant part the following isolated polypeptides or compositions can be used.

[0592] Any isolated polypeptide described herein (e.g., an isolated RHPP or RI-RHPP or an isolated glucanase, amylase and/or chitinase) can be used in this method. For example, an isolated RHPP or RI-RHPP having an amino acid sequence comprising or consisting of any one of SEQ ID NOs: 745-766 can be used in this method. Alternatively, an isolated glucanase, amylase, or chitinase having an amino acid sequence comprising or consisting of any one of SEQ ID NOs: 732 and 767-778 can be used in this method. For example, the isolated polypeptide can comprise a glucanase having an amino acid sequence comprising or consisting of any one of SEQ ID NO: 732 and 767-776. As another example, the isolated polypeptide can comprise an amylase having an amino acid sequence comprising or consisting of SEQ ID NO: 735. As another example, the isolated polypeptide can comprise a chitinase comprising or consisting of SEQ ID NO: 777 or SEQ ID NO: 778. In some instances, a β-1,3-glucanase (including β-1,3-glucanases not specifically identified herein) can be used in this method. Preferably, the β-1,3-glucanase is applied endogenously (e.g., injected into) the plant.

[0593] A composition comprising bixafen and a free polypeptide (i.e., not bound to an exosporium of a Bacillus cereus family member or an intact Bacillus cereus family member spore) can be used. The free polypeptide can comprise (i) a flagellin or flagellin-associated polypeptide; or (ii) a retro inverso flagellin or flagellin-associated polypeptide; or (iii) a root hair promoting polypeptide (RHPP); or (iv) a retro inverso root hair promoting polypeptide (RI RHPP); or (v) a thionin or thionin-like polypeptide; or (vi) a glucanase polypeptide; or (vii) a serine protease polypeptide; or (viii) an ACC deaminase (1-aminocyclopropane-1-carboxylate deaminase) polypeptide; or (ix) an amylase; or (x) a chitinase; or (xi) any combination thereof.

[0594] The composition can comprise a free polypeptide comprising a root hair promoting polypeptide (RHPP), a retro-inverso root hair promoting polypeptide (RI-RHPP), a chitinase, a flagellin or flagellin associated polypeptide, a glucanase, a serine protease or any combination thereof.

[0595] The composition can comprise a free polypeptide wherein an amino acid sequence of the free polypeptide can comprise any one of SEQ ID NOs: 604, 606, 607 and 745-755 (root hair promoting polypeptide, RHPP), any one of SEQ ID NOs: 605, and 756-766 (retro-inverso root hair promoting polypeptide, RI-RHPP), any one of SEQ ID NOs 226 and 571 (flagellin or flagellin associated polypeptide), any one of SEQ ID NOs: 731-733 and 767-778 (glucanase), any one of SEQ ID NOs: 777 and 778 (chitinases) or any one of SEQ ID NOs: 721, 722 and 794-796 (serine proteases).

[0596] The composition can comprise bixafen and a free polypeptide comprising a root hair promoting polypeptide and an amino acid sequence of the RHPP can comprise any one of SEQ ID NOs: 604, 606, 607 and 745-755. For example, the amino acid sequence of the RHPP can comprise SEQ ID NO: 604.

[0597] The composition can comprise at least one bioactive priming polypeptide.

[0598] The composition can comprise at least one flagellin or flagellin-associated polypeptide of (i). An amino acid sequence of the flagellin or flagellin associated polypeptide can comprise any one of SEQ ID NOs: 226, 289, 290, 291, 293, 294, 295, 300, 437, 532, 534, 536, 538, 540, 571-58, and 589-603. In some cases, the amino acid sequence of the flagellin or flagellin associated polypeptide comprises any one of SEQ ID NOs: 226, 293, 295, 300, 540, 571-579, and 589-590. For example, the composition can comprise a flagellin or flagellin-associated polypeptide having an amino acid sequence comprising SEQ ID NO: 226 or 571. For example, the composition can comprise a flagellin or flagellin-associated polypeptide having an amino acid sequence comprising SEQ ID NO: 226.

[0599] The composition can comprise at least one retro inverso flagellin or flagellin-associated polypeptide. The retro-inverso flagellin or flagellin associated polypeptide can comprise a retro-inverso Flg22 polypeptide, a retro-inverso FlgII-28 polypeptide and/or an Flg15 polypeptide.

[0600] The composition can comprise at least one retro inverso Flg22 polypeptide. An amino acid sequence of the retro inverso Flg22 polypeptide can comprise any one of SEQ ID NOs: 376-450, 527, 531, 533, 535, 537 and 539.

[0601] The composition can comprise at least one retro-inverso FlgII-28 polypeptide. An amino acid sequence of the retro-inverso FlgII-28 polypeptide can comprise any one of SEQ ID NOs: 451-525, or 588.

[0602] The composition can comprise at least one retro-inverso Flg15 polypeptide. An amino acid sequence of the retro-inverso Flg15 polypeptide can comprise SEQ ID NOs: 529 or 586.

[0603] The composition can comprise at least one RHPP. An amino acid sequence of the RHPP polypeptide can comprise any one of SEQ ID Nos: 604, 607, 608 and 745-755. For example, the composition can comprise an RHPP having an amino acid sequence comprising SEQ ID NO: 604.

[0604] The composition can comprise at least one retro-inverso RHPP polypeptide. An amino acid sequence of the retro-inverso RHPP polypeptide can comprise any one of SEQ ID NO: 605, 609, 610 and 756-766.

[0605] The composition can comprise at least one thionin or thionin-like polypeptide. An amino acid sequence of the thionin or thionin-like polypeptide can comprise any one of SEQ ID NOs: 620-719. For example, the composition can comprise a thionin or thionin-like polypeptide having an amino acid sequence comprising SEQ ID NO: 620. In some instances, the thionin or thionin-like polypeptide can be fused to a phloem targeting sequence to form a fused polypeptide. The phloem or phloem targeting sequence can comprise any one of SEQ ID NOs: 611-619 or any combination thereof. In some cases, the phloem or phloem targeting sequence comprises SEQ ID NO: 611. In some cases, the fusion polypeptide comprising a thionin or thionin-like polypeptide and a phloem or phloem targeting sequence can comprise SEQ ID NO: 720.

[0606] The composition can comprise at least one glucanase polypeptide. An amino acid sequence of the glucanase polypeptide can comprise any one of SEQ ID NOs: 731-733 and 767-776. The composition can comprise at least one amylase polypeptide. An amino acid sequence of the amylase polypeptide can comprise SEQ ID NO: 734 or SEQ ID NO: 735. The composition can comprise at least one chitinase polypeptide. An amino acid sequence of the chitinase polypeptide can comprise SEQ ID NO: 777 or SEQ ID NO: 778. In some instances, the composition can comprise two or more glucanases (e.g., β-1,3-glucanases), amylases or chitinases. For example, the composition can comprise a glucanase polypeptide (e.g., a 13-1,3-glucanase) having an amino acid sequence comprising SEQ ID NO: 731-733 and 767-776 and an amylase having an amino acid sequence comprising SEQ ID NO: 734 or SEQ ID NO: 735. Alternatively, the composition can comprise a glucanase (e.g., a β-1,3-glucanase) and a chitinase having an amino acid sequence comprising SEQ ID NO: 777 or SEQ ID NO: 778. Preferably, the composition can comprise a β-1,3-glucanase having an amino acid sequence comprising SEQ ID NO: 772.

[0607] The composition can comprise at least one serine protease polypeptide. An amino acid sequence of the serine protease polypeptide can comprise any one of SEQ ID NOs: 721, 722 and 794-796. For example, the composition can comprise a serine protease polypeptide having an amino acid sequence comprising SEQ ID NO: 722 or 795. For example, the composition can comprise a serine protease polypeptide having an amino acid sequence comprising SEQ ID NO: 794 or 796.

[0608] The composition can comprise at least one ACC deaminase polypeptide. An amino acid sequence of the ACC deaminase polypeptide can comprise any one of SEQ ID NOs: 723-730. For example, the composition can comprise an ACC deaminase polypeptide having an amino acid sequence comprising SEQ ID NO: 730.

[0609] The composition can comprise at least two bioactive polypeptides.

[0610] The composition can comprise a flagellin or flagellin associated polypeptide and a thionin or thionin-like polypeptide. For example, the composition can comprise a flagellin or flagellin associated polypeptide having an amino acid sequence comprising SEQ ID NO: 571 and a thionin polypeptide having an amino acid sequence comprising SEQ ID NO: 620.

[0611] The composition can comprise a flagellin or flagellin associated polypeptide and an RHPP polypeptide. For example, the composition can comprise a flagellin or flagellin associated polypeptide having an amino acid sequence comprising SEQ ID NO: 571 and an RHPP polypeptide having an amino acid sequence comprising SEQ ID NO: 604.

[0612] The composition can comprise a flagellin or flagellin associated polypeptide and a serine protease. For example, the composition can comprise a flagellin or flagellin associated polypeptide having an amino acid sequence comprising SEQ ID NO: 226 or 571 and a serine protease having an amino acid sequence comprising SEQ ID NO: 721, 722 and 794-796.

[0613] The composition can comprise a flagellin or flagellin associated polypeptide and a glucanase. For example, the composition can comprise a flagellin or flagellin associated polypeptide having an amino acid sequence comprising SEQ ID NO: 226 or 571 and a glucanase having an amino acid sequence comprising any one of SEQ ID NOs: 731-733 and 767-776. In some cases, the composition can comprise a flagellin or flagellin associated polypeptide having an amino acid sequence comprising SEQ ID NO: 226 or 571 and a glucanase having an amino acid sequence comprising any one of SEQ ID NOs: 732 or 772.

[0614] The composition can comprise a flagellin or flagellin associated polypeptide and an amylase. For example, the composition can comprise a flagellin or flagellin associated polypeptide having an amino acid sequence comprising SEQ ID NO: 226 or 571 and an amylase having an amino acid sequence comprising SEQ ID NO: 734 or 735.

[0615] The composition can comprise a flagellin or flagellin associated polypeptide and a chitinase. For example, the composition can comprise a flagellin or flagellin associated polypeptide having an amino acid sequence comprising SEQ ID NO: 226 or 571 and a chitinase having an amino acid sequence comprising SEQ ID NO: 777 or 778.

[0616] The composition can comprise a glucanase and an amylase, or a glucanase and a chitinase. For example, the composition can comprise a β-1,3-endoglucanase and an amylase. For example, the composition can comprise a β-1,3-endoglucanase having an amino acid sequence comprising any one of SEQ ID NO: 731-733 and 767-776 and an amylase having an amino acid sequence comprising SEQ ID NO: 734 or SEQ ID NO: 735. As an additional example, the composition can comprise a β-1,3-endoglucanase and a chitinase. For example, the composition can comprise a β-1,3-endoglucanase having an amino acid sequence comprising any one of SEQ ID NO: 731-733 and 767-776 and a chitinase having an amino acid sequence comprising SEQ ID NO: 777 or SEQ ID NO: 778.

[0617] Compositions described herein having a glucanase in combination with an amylase or a chitinase can further comprise at least one flagellin or flagellin associated polypeptide. For example, a composition can comprise at least one flagellin or flagellin associated polypeptide, a β-1,3-endoglucanase and an amylase. For instance, the composition can comprise a flagellin or flagellin associated polypeptide having an amino acid sequence comprising SEQ ID NO: 226 or 571, a β-1,3-endoglucanse having an amino acid sequence comprising any one of SEQ ID NO: 731-733 and 767-776 and an amylase having an amino acid sequence comprising SEQ ID NO: 734 or 735. As an additional example, a composition can comprise at least one flagellin or flagellin associated polypeptide, a β-1,3-endoglucanase and a chitinase. For instance, the composition can comprise a flagellin or flagellin associated polypeptide having an amino acid sequence comprising SEQ ID NO: 226 or 571, a β-1,3-endoglucanse having an amino acid sequence comprising any one of SEQ ID NO: 731-733 and 767-776 and a chitinase having an amino acid sequence comprising SEQ ID NO: 777 or SEQ ID NO: 778

[0618] The composition can comprise a flagellin or flagellin associated polypeptide and an ACC deaminase. For example, the composition can comprise a flagellin or flagellin associated polypeptide having an amino acid sequence comprising SEQ ID NO: 226 or 571 and an ACC deaminase having an amino acid sequence comprising SEQ ID NO: 730.

[0619] The composition can comprise a root hair promoting polypeptide (RHPP) or a retro-inverso root hair promoting polypeptide (RI-RHPP) and a glucanase. For example, the composition can comprise a RHPP having an amino acid sequence comprising any one of SEQ ID NOs: 745-756 or a RI-RHPP comprising any one of SEQ ID NOs: 757-766 and a β-1,3-glucanase having an amino acid sequence comprising any one of SEQ ID NOs: 731-733 and 767-776.

[0620] The composition can comprise a root hair promoting polypeptide (RHPP) or a retro-inverso root hair promoting polypeptide (RI-RHPP) and an ACC deaminase. For example, the composition can comprise an RHPP having an amino acid sequence comprising any one of SEQ ID NOs: 745-756 or an RI-RHPP comprising any one of SEQ ID NOs: 757-766 and an ACC deaminase having an amino acid sequence comprising any one of SEQ ID NOs: 723-730.

[0621] The composition can comprise a glucanase and a serine protease. For example, the composition can comprise a glucanase (e.g., a β-1,3-glucanase) having an amino acid sequence comprising any one of SEQ ID NOs: 731-733 and 767-776 and a serine protease having an amino acid sequence comprising SEQ ID NO: 721, 722 and 794-796. For example, the composition can comprise a glucanase having an amino acid sequence comprising SEQ ID NO: 772 or 732 and a serine protease having an amino acid sequence comprising any one of SEQ ID NOs: 722 and 794-796. The composition can comprise a bioactive polypeptide and at least one inducer compound.

[0622] The composition can comprise a flagellin or flagellin associated polypeptide and a callose synthase inhibitor. For example, the composition can comprise a flagellin or flagellin associated polypeptide having an amino acid sequence comprising SEQ ID NO: 226 or 571 and a callose synthase inhibitor. The callose synthase inhibitor can comprise 2-deoxy-D-glucose (2-DDG). Optionally, the composition can further comprise a bacteriocide (e.g., oxytetracycline).

[0623] The composition can comprise a flagellin or flagellin associated polypeptide and an amino acid. For example, the composition can comprise a flagellin or flagellin associated polypeptide having an amino acid sequence comprising SEQ ID NO: 226 or 571 and an amino acid. The amino acid can comprise L-cysteine or β-amino-butyric acid (BABA). Preferably, the amino acid comprises β-amino-butyric acid (BABA). Optionally, the composition can further comprise a bacteriocide (e.g., oxytetracycline).

[0624] The composition can comprise a flagellin or flagellin associated polypeptide and a substituted or unsubstituted benzoic acid. For example, the composition can comprise a flagellin or flagellin associated polypeptide having an amino acid sequence comprising SEQ ID NO: 226 or 571 and a substituted or unsubstituted benzoic acid. The substituted benzoic acid can comprise salicylic acid. Optionally, the composition can further comprise a bacteriocide (e.g., oxytetracycline).

[0625] The composition can comprise a flagellin or flagellin associated polypeptide and a benzothiadiazole. For example, the composition can comprise a flagellin or flagellin associated polypeptide having an amino acid sequence comprising SEQ ID NO: 226 or 571 and a benzothiadiazole. The benzothiadiazole can comprise benzo (1,2,3)-thiadiazole-7-carbothioic acid-S-methyl ester, available commercially as ACTIGARD 50WG fungicide. Optionally, the composition can further comprise a bacteriocide (e.g., oxytetracycline).

[0626] The composition can comprise a flagellin or flagellin associated polypeptide and a dicarboxylic acid. For example, the composition can comprise a flagellin or flagellin associated polypeptide having an amino acid sequence comprising SEQ ID NO: 226 or 571 and a dicarboxylic acid. The dicarboxylic acid can comprise oxalic acid. Optionally, the composition can further comprise a bacteriocide (e.g., oxytetracycline).

[0627] The composition can comprise a flagellin or flagellin associated polypeptide and a betaine. For example, the composition can comprise a flagellin or flagellin associated polypeptide having an amino acid sequence comprising SEQ ID NO: 226 or 571 and a betaine. The betaine can comprise betaine-hydrochloride or glycine betaine. Optionally, the composition can further comprise a bacteriocide (e.g., oxytetracycline).

[0628] The composition can comprise a flagellin or flagellin associated polypeptide and a proline. For example, the composition can comprise a flagellin or flagellin associated polypeptide having an amino acid sequence comprising SEQ ID NO: 226 or 571 and a proline. The proline can comprise L-proline. Optionally, the composition can further comprise a bacteriocide (e.g., oxytetracycline).

[0629] The composition can comprise a flagellin or flagellin associated polypeptide and an herbicide. For example, the composition can comprise a flagellin or flagellin associated polypeptide having an amino acid sequence comprising SEQ ID NO: 226 or 571 and a herbicide. The herbicide can comprise lactofen. Optionally, the composition can further comprise a bacteriocide (e.g., oxytetracycline).

[0630] The composition can comprise a flagellin or flagellin associated polypeptide and a succinate dehydrogenase inhibitor. For example, the composition can comprise a flagellin or flagellin associated polypeptide having an amino acid sequence comprising SEQ ID NO: 226 or 571 and a succinate dehydrogenase inhibitor. The succinate dehydrogenase inhibitor can comprise bixafen.

[0631] The composition can comprise a flagellin or flagellin associated polypeptide and a bacteriocide. For example, the composition can comprise a flagellin or flagellin associated polypeptide having an amino acid sequence comprising SEQ ID NO: 226 or 571 and a bacteriocide. The bacteriocide can comprise oxytetracycline.

[0632] The composition can comprise a root hair promoting polypeptide or a retro inverso root hair promoting polypeptide and a succinate dehydrogenase inhibitor. For example, the composition can comprise a root hair promoting polypeptide or a retro inverso root hair promoting polypeptide having an amino acid sequence comprising any one of SEQ ID NOs: 745-766 and a succinate dehydrogenase inhibitor. The succinate dehydrogenase inhibitor can comprise bixafen. The root hair promoting polypeptide or the retro inverso root hair promoting polypeptide can comprise a free polypeptide.

[0633] The composition can comprise flagellin or flagellin associated polypeptide or a retro inverso flagellin or flagellin-associated polypeptide and a succinate dehydrogenase inhibitor. For example, the composition can comprise a flagellin or flagellin associated polypeptide having an amino acid sequence comprising any one of SEQ ID NOs: 226, 289, 290, 291, 293, 294, 295, 300, 437, 526, 532, 534, 536, 538, 540, 571-585, and 587-603 or a retro inverso flagellin or flagellin associated polypeptide having an amino acid sequence comprising any one of SEQ ID NOs: 376-525, 527, 529, 531, 533, 535, 537, 539, or 588, or 586 and a succinate dehydrogenase inhibitor. The succinate dehydrogenase inhibitor can comprise bixafen. The serine protease can comprise a free polypeptide.

[0634] The composition can comprise a glucanase and a succinate dehydrogenase inhibitor. For example, the composition can comprise glucanase having an amino acid sequence comprising any one of SEQ ID NOs: 731-733 and 767-776 and a succinate dehydrogenase inhibitor. The succinate dehydrogenase inhibitor can comprise bixafen. The glucanase can comprise a free polypeptide.

[0635] The composition can comprise a chitinase and a succinate dehydrogenase inhibitor. For example, the composition can comprise a chitinase having an amino acid sequence comprising SEQ ID NO: 777 or 778 and a succinate dehydrogenase inhibitor. The succinate dehydrogenase inhibitor can comprise bixafen. The chitinase can comprise a free polypeptide.

[0636] The composition can comprise a serine protease and a succinate dehydrogenase inhibitor. For example, the composition can comprise a serine protease having an amino acid sequence comprising any one of SEQ ID NOs: 721, 722, and 794-796 and a succinate dehydrogenase inhibitor. The succinate dehydrogenase inhibitor can comprise bixafen. The serine protease can comprise a free polypeptide.

[0637] The composition can comprise a thionin and a succinate dehydrogenase inhibitor. For example, the composition can comprise a thionin having an amino acid sequence comprising any one of SEQ ID NOs: 620-719 and a succinate dehydrogenase inhibitor. The succinate dehydrogenase inhibitor can comprise bixafen. The thionin or thionin-like polypeptide can comprise a free polypeptide.

[0638] The composition can comprise an ACC deaminase polypeptide and a succinate dehydrogenase inhibitor. For example, the composition can comprise an ACC deaminase polypeptide having an amino acid sequence comprising any one of SEQ ID NOs: 723-730 and a succinate dehydrogenase inhibitor. The succinate dehydrogenase inhibitor can comprise bixafen. The ACC deaminase can comprise a free polypeptide.

[0639] The composition can comprise an amylase and a succinate dehydrogenase inhibitor. For example, the composition can comprise an amylase having an amino acid sequence comprising any one of SEQ ID NOs 734 and 735 and a succinate dehydrogenase inhibitor. The succinate dehydrogenase inhibitor can comprise bixafen. The amylase can comprise a free polypeptide.

[0640] The composition can comprise a root hair promoting polypeptide or a retro inverso root hair promoting polypeptide and a betaine. For example, the composition can comprise an root hair promoting polypeptide (RHPP) having an amino acid sequence comprising any one of SEQ ID NOs: 604, 607, 608, and 745-756 or a retro inverso root hair promoting polypeptide (RI-RHPP) comprising any one of SEQ ID NOs: 605, 757-766 and a betaine. The betaine can comprise betaine hydrochloride or glycine betaine. Optionally, the composition can further comprise a bacteriocide (e.g., oxytetracycline).

[0641] The composition can comprise a root hair promoting polypeptide or a retro inverso root hair promoting polypeptide and a proline. For example, the composition can comprise a root hair promoting polypeptide (RHPP) having an amino acid sequence comprising any one of SEQ ID NOs: 604, 607, 608, and 745-756 or a retro inverso root hair promoting polypeptide (RI-RHPP) comprising any one of SEQ ID NOs: 605, and 757-766 and a proline. The proline can comprise L-proline. Optionally, the composition can further comprise a bacteriocide (e.g., oxytetracycline).

[0642] Any composition particularly described herein is effective at treating citrus plants or plant parts and citrus diseases. They can also be employed as in furrow or foliar treatments to improve yield of a tree. They can also be employed as in furrow or foliar treatments to increase crop yield (e.g., in row crops).

[0643] For instance, methods of treating a plant disease in a plant in need thereof can comprise administering to the plant by trunk injection, a foliar spray, a soil drench or a seed treatment application, a composition which comprises a flagellin or flagellin associated polypeptide and at least one inducer compound comprising β-aminobutyric acid (BABA) or a salt thereof, 2-deoxy-D-glucose (2-DDG) or a salt thereof, salicylic acid (SA) or a salt thereof; and oxalic acid (OA) or a salt thereof, L-cysteine and an analog of L-cysteine and an acid or a salt thereof, an antimicrobial protein comprising a thionin or a thionin-like peptide or any combination thereof. Optionally, the composition can further comprise a bacteriocide (e.g., oxytetracycline). The flagellin or flagellin associated polypeptide can be a Flg22 polypeptide (e.g., a polypeptide having an amino acid sequence comprising SEQ ID NO: 226 or 571).

[0644] The disease can comprise Asian citrus greening, Huanglonging (HLB) disease, Asian soybean rust, Sclerotinia stem rot (or white mold), Pseudomonas leaf spot, or Cercospora leaf blight.

[0645] In the methods, the composition can be applied just prior to floral formation or at the pre-flowering stage.

[0646] The growth can comprise root and floral apical meristems, floral organ production, fruit development, fruit production, number of floral organs, size of floral organs, or a combination thereof.

[0647] In the methods, protecting the plant or the plant part from disease can comprise prophylactic treatment, treatment, prevention and decreased disease progression on or in the plant or plant part.

[0648] The disease can comprise Asian citrus greening disease (HLB), Citrus canker disease, Cercospora leaf blight or a bacteria causing disease.

[0649] The bacteria causing disease can comprise bacterial leaf blight, bacterial leaf streak, bacterial stalk rot, bacterial leaf spot, bacterial leaf scorch, bacterial top rot, bacterial stripe, chocolate spot, Goss's bacterial wilt and blight, Holcus spot, purple leaf sheath, seed rot, seedling blight, Stewart's disease (bacterial wilt), corn stunt, Fire Blight, Pierce's disease, citrus variegated chlorosis, citrus canker, Pseudomonas syringae serovars, or a combination thereof.

[0650] The methods can further comprise preventing or reducing callose deposition in or around phloem plasmodesmata in a tree infected with Canditus (Ca.) Liberibacter

[0651] The methods can further comprise decreasing fruit drop from a plant infected with a disease. For example, the disease can comprise a Canditus (Ca.) Liberibacter infection and/or Huanglongbing (HLB).

[0652] In the methods, the polypeptide, the composition, or the recombinant microorganism can be applied exogenously to the plant, the plant part, or the plant growth medium.

[0653] In the methods, the polypeptide, the composition, or the recombinant microorganism can be applied endogenously to the plant or the plant part. For example, the polypeptide, the composition or the recombinant microorganism can be applied to the vascular system of the plant (e.g., via injection into a plant trunk, stem, root, or vine).

[0654] The plant part can include a plant cell, a leaf, a branch, a trunk, a vine, a plant tissue (i.e., xylem or phloem), a stem, a flower, a foliage, a floral organ, a fruit, pollen, a vegetable, a tuber, a rhizome, a corm, a bulb, a pseudobulb, a pod, a root, a root ball, a root stock, a scion, or a seed.

[0655] In the methods, the isolated polypeptide or composition can be applied to a surface of the plant, a foliage of the plant or a surface of a seed of the plant.

[0656] In the methods, the isolated polypeptide or composition can be applied to the surface of the seed and the plant or the plant part is grown from the seed.

[0657] In the methods, the isolated polypeptide or composition can be injected into a branch, trunk, stem, vasculature, root, or vine of the plant.

[0658] In the methods, the isolated polypeptide or composition can be applied as a foliar application.

[0659] In the methods, the isolated polypeptide or composition can be injected into a branch, trunk, stem, vine, or root of the plant.

[0660] In the methods wherein a composition comprising a polypeptide and an inducer compound, or two polypeptides or two inducer compounds is used; the composition can be prepared in two separate compositions to allow for separate (e.g., sequential) application of the two components. That is the methods can comprise sequentially applying one or more components of the composition to the plant or plant part. For example, the method can comprise sequentially applying one or more of the polypeptides of the composition and one or more of the inducer compounds of the composition to the plant or plant part.

[0661] The sequential applications can be made within 100 hours, within 72 hours, within 48 hours, within 24 hours, within 12 hours, or within 4 hours.

[0662] For example, a composition comprising a polypeptide (e.g., a flagellin or flagellin associated polypeptide) and an inducer (e.g., a callose synthase inhibitor) can be prepared as two separate compositions and administered separately (e.g., sequentially) to the plant or plant part. Alternatively, the compositions can be combined and applied at the same time.

[0663] The plant can be a fruit plant or a vegetable plant, and the method provides increased yield of fruits or vegetables.

[0664] The plant can be a tree or a vine.

[0665] The plant can be a row crop (e.g., corn or soybean)

[0666] The plant can be a citrus plant (e.g., a citrus tree).

[0667] The plant can be a citrus plant and the method reduces disease symptoms in the citrus plant. For example, the improved disease symptoms can comprise a reduction in a pathogen titer (i.e., a bacterial titer), as described below.

### Methods for Quantifying CLas Titer in an Infected Citrus Plant

[0668] The presences of the CLas bacterial titers in the HLB infected citrus trees can be determined with quantitative real-time polymerase chain reaction (qPCR) methods using specific primers to confirm the presence of the disease (Li, W. B., Hartung, J. S. and Levy, L. 2008 “Optimized quantification of unculturable ‘Candidatus Liberibacter spp.’ In host plants using real-time PCR”, Plant Disease 92: 854-861). DNA extraction and quantitative PCR (qPCR) analysis on these leaves was performed at Southern Gardens Citrus (Clewiston, Fla.) using HLB primer set targeting the 16S DNA of C. liberibacter bacteria 5′» 3′ (forward): HLB as TCGAGCGCGTATGCAATACG; (SEQ ID NO: 742, forward) HLBr: GCGTTATCCCGTAGAAAAAGGTAG (SEQ ID NO: 743, reverse); HLBpc (probe): AGACGGFTGAGTAACGCG (SEQ ID NO: 744), where “F” represents a fluorescent reporter dye label intercalated in the probe sequence]. Forty cycles of qPCR were conducted and the fluorescent signal which is proportional to the amount of dsDNA in solution was measured. The qPCR analysis allows for the detection of the CLas bacteria in citrus tissue. The cycle threshold (Ct) values from the qPCR analysis were obtained per each treatment. The Ct measurement is equivalent to the number of PCR cycles required to produce a relative threshold level. As in common practice within the field of molecular biology, the change in Ct value is reported to indicate the relative quantity of CLas DNA either in treated vs untreated samples or in treated samples at one time point vs another time. The higher the Ct value, the greater or more effective the treatment effect, which is indicated by the reduction/elimination of CLas bacteria from the tree. A percentage reduction in bacterial load can be computed as:

% reduction in sample over time=(1−2[Ct (initial time)−Ct(later time)])*100%

or

% reduction in treated vs. control sample=(1−2[Ct (control sample)-Ct(treated sample)])*100%

Methods of Improving the Quality and Quantity of Juice Obtained from a Plant

[0669] The method can also comprise increasing fruit yield and/or improving the quality and/or quantity of the juice obtained from a plant. Juice quality is typically expressed in terms of the sugar (Brix) and acid content. A particularly useful measure of juice quality is the ratio of the two (e.g. a Brix:acid ratio). Methods for obtaining a Brix:acid ratio are described in the art (JBT Food Tech Laboratory Manual, “Procedures for Analysis of Citrus Products, Sixth edition). The methods, therefore, can comprise increasing juice content and/or improving sugar or acid content and/or improving a Brix:acid ratio in a juice obtained from a citrus plant or plant part.

[0670] Any isolated polypeptide described herein (e.g., an isolated RHPP or RI-RHPP or an isolated glucanase, amylase and/or chitinase) can be used in this method. For example, an isolated RHPP or RI-RHPP having an amino acid sequence comprising or consisting of any one of SEQ ID NOs: 745-766 can be used in this method. Alternatively, an isolated glucanase, amylase, or chitinase having an amino acid sequence comprising or consisting of any one of SEQ ID NOs: 732, 735 and 767-778 can be used in this method. For example, the isolated polypeptide can comprise a glucanase having an amino acid sequence comprising or consisting of any one of SEQ ID NO: 732 and 767-776. As another example, the isolated polypeptide can comprise an amylase having an amino acid sequence comprising or consisting of SEQ ID NO: 735. As another example, the isolated polypeptide can comprise a chitinase comprising or consisting of SEQ ID NO: 777 or SEQ ID NO: 778.

[0671] Any composition comprising at least one polypeptide as described herein can be used in this method. For example, the composition can comprise at least one flagellin or flagellin-associated polypeptide (e.g., having an amino acid sequence comprising any one of SEQ ID NO: 571, 1-375, 526, 528, 530, 532, 534, 536, 538, 540, 541, 572-585, 587, and 589-603) or at least one retro inverso flagellin or flagellin associated polypeptide (e.g., having an amino acid sequence comprising any one of SEQ ID NO: 376-525, 527, 529, 531, 533, 535, 537, 539, or 588, or 586); or at least one RHPP polypeptide (e.g., having an amino acid sequence comprising any one of SEQ ID NOs: 604, 607, 608, and 745-756), or at least one RI-RHPP polypeptide (e.g., having an amino acid sequence comprising any one of SEQ ID NOs: 605, 609, 610, and 757-766), or at least one thionin or thionin-like polypeptide (e.g., having an amino acid sequence comprising any one of SEQ ID NOs: 620-719), or at least one serine protease (e.g., having an amino acid sequence comprising any one of SEQ ID NOs: 721-722 and 794-796), or at least one glucanase (e.g., having an amino acid sequence comprising any one of SEQ ID NOs: 731-735 and 767-776), or at least one ACC deaminase (e.g., having an amino acid sequence comprising any one of SEQ ID NOs: 723-730) as described herein.

[0672] Any composition comprising at least one free polypeptide as described herein can be used in this method. For example, the composition can comprise at least one free polypeptide comprising a flagellin or flagellin-associated polypeptide (e.g., having an amino acid sequence comprising any one of SEQ ID NO: 571, 1-375, 526, 528, 530, 532, 534, 536, 538, 540, 541, 572-585, 587, and 589-603) or at least one free polypeptide comprising a retro inverso flagellin or flagellin associated polypeptide (e.g., having an amino acid sequence comprising any one of SEQ ID NO: 376-525, 527, 529, 531, 533, 535, 537, 539, or 588, or 586); or at least one free polypeptide comprising a RHPP polypeptide (e.g., having an amino acid sequence comprising any one of SEQ ID NOs: 604, 607, 608, and 745-756), or at least one free polypeptide comprising a RI-RHPP polypeptide (e.g., having an amino acid sequence comprising any one of SEQ ID NOs: 605, 609, 610, and 757-766), or at least one free polypeptide comprising a thionin or thionin-like polypeptide (e.g., having an amino acid sequence comprising any one of SEQ ID NOs: 620-719), or at least one free polypeptide comprising a serine protease (e.g., having an amino acid sequence comprising any one of SEQ ID NOs: 721-722 and 794-796), or at least one free polypeptide comprising a glucanase (e.g., having an amino acid sequence comprising any one of SEQ ID NOs: 731-735 and 767-776), or at least one free polypeptide comprising a ACC deaminase (e.g., having an amino acid sequence comprising any one of SEQ ID NOs: 723-730) as described herein

[0673] In the methods of improving juice quantity and/or quality the composition can also comprise any inducer described herein. Suitable inducers that can be used in combination or with a polypeptide to improve juice quantity include a callose synthase inhibitor, a bacteriocide, an amino acid or isomer thereof, a substituted or unsubstituted benzoic acid or derivative or salt thereof, a dicarboxylic acid or derivative or salt thereof, a benzothiadiazole, a betaine, a proline, a succinate dehydrogenase inhibitor (e.g., bixafen) or any combination thereof.

[0674] In the methods of improving juice quantity and/or quality, the plant can be a tree or a vine. The plant can be also be citrus plant (e.g., a citrus tree).

[0675] The citrus plant can comprise an orange, a lemon, a lime, a tangerine, a kumquat, a tangelo, or any variety, hybrid or cross thereof.

[0676] The plant can be a row crop. For example, the row crop can be corn or soybean.

[0677] In the methods wherein a composition comprising a polypeptide and an inducer compound, or two polypeptides or two inducer compounds is used; the composition can be prepared in two separate compositions to allow for separate (e.g., sequential) application of the two components. That is the methods can comprise sequentially applying one or more components of the composition to the plant or plant part. For example, the method can comprise sequentially applying one or more of the polypeptides of the composition and one or more of the inducer compounds of the composition to the plant or plant part.

[0678] The sequential applications can be made within 100 hours, within 72 hours, within 48 hours, within 24 hours, within 12 hours, or within 4 hours.

[0679] For example, a composition comprising a polypeptide (e.g., a flagellin or flagellin associated polypeptide) and an inducer (e.g., a callose synthase inhibitor) can be prepared as two separate compositions and administered separately (e.g., sequentially) to the plant or plant part. Alternatively, the compositions can be combined and applied at the same time.

[0680] Methods are also provided comprising applying to the plant or plant part a second composition, wherein the second composition comprises any polypeptide described herein and/or any inducer compound described herein.

[0681] In the methods, the isolated polypeptides or compositions can be applied exogenously or endogenously to the plant or plant part. When applied endogenously, the isolated polypeptide (e.g., a β-1,3-glucanase) or the composition can be injected into a trunk, root, or stem of the plant. The injection can be performed to ensure delivery of the isolated polypeptide or the composition directly into the vascular system of the plant or plant part—that is, into the xylem and/or phloem of the plant or plant part.

[0682] In methods where the compositions are applied two or more times during a growing season, the first application can occur at or before the V2 stage of development, and subsequent applications can occur before the plant flowers. For example, the first application can occur as a seed treatments, at/or before the VE stage of development, at or before the V1 stage of development, at or before the V2 stage of development, at or before the V3 stage of development, at or before the V4 stage of development, at or before the V5 stage of development, at or before the V6 stage of development, at or before the V7 stage of development, at or before the V8 stage of development, at or before the V9 stage of development, at or before the V10 stage of development, at or before the V11 stage of development, at or before the V12 stage of development, at or before the V13 stage of development, at or before the V14 stage of development, at or before the V15 stage of development, at or before the VT stage of development, at or before the R1 stage of development, at or before the R2 stage of development, at or before the R3 stage of development, at or before the R4 stage of development, at or before the R5 stage of development, at or before the R6 stage of development, at or before the R7 stage of development, or at or before the R8 stage of development. By way of example, the first application can occur at or before the germination stage, at or before the seedling stage, at or before the tillering stage, at or before the stem elongation stage, at or before the booting stage, or at or before the heading stage. For example, where the Feekes growth stage scale is used to identify the stage of growth of a cereal crop, the first application can occur at or before stage 1, at or before stage 2, at or before stage 3, at or before stage 4, at or before stage 5, at or before stage 6, at or before stage 7, at or before stage 8, at or before stage 9, at or before stage 10, at or before stage 10.1, at or before stage 10.2, at or before stage 10.3, at or before stage 10.4, or at or before stage 10.5.

### Abiotic Stress

[0683] Abiotic stress causes significant crop loss and can result in major reductions in crop production and yield potential. The bioactive priming polypeptides and compositions as described herein can be used as chemical priming agents to increase tolerance of a plant to one or more abiotic stresses. Thus, the flagellin polypeptides, flagellin-associated polypeptides of Flg22 or FlgII-28 derived from Bacillus species, Flg15 and Flg22 derived from E. coli and other organisms (Table 5) and the RHPP polypeptides derived from Glycine max (Tables 11 to 13) are useful for increasing the tolerance of a plant, group of plants, field of plants and/or the parts of plants to abiotic stress. The polypeptides and compositions as described herein impart abiotic stress tolerance to a plant or plant part. The abiotic stress tolerance imparted to a plant or plant part are to abiotic stresses that include, but are not limited to: temperature stress, radiation stress, drought stress, cold stress, salt stress, osmotic stress, nutrient-deficient or high metal stress, and water stress that results from water deficit, flooding or anoxia. Chemical priming using the bioactive priming polypeptides and compositions as described herein are applied to a plant or plant part offering a versatile approach to protect the plant or plant part against individual, multiple or combined abiotic stresses.

[0684] The polypeptides and compositions as described herein are effective to protect a plant against abiotic stressors when applied as an above ground foliar application to a plant, a plant part, a plant root, a plant seed, a plant growth medium, or the area surrounding a plant or the area surrounding a plant seed. For example, for trees, one or more applications can be applied at different growth timings of trees, including timings before, during or after flushes; before, during, or after fruit set; or before or after fruit harvest.

[0685] The methods described herein chemically prime the plant for protection against abiotic stress(es) in such a way that the plant has already prepared and initiated defense mechanisms that can be activated faster and increase tolerance to an abiotic stress or multiple stressors occurring simultaneously or at different times during the growing season.

[0686] The retro inverso forms of the Flg22 polypeptides as described herein can be applied externally as a foliar spray application (or using other application methods as well, for example as a root drench) during times of excessive heat, water, and drought stress and be used to protect a plant against drought, heat stress and/or other abiotic stresses that can affect stomatal aperture and oscillation that commonly occur with transpiration loss through a plant.

[0687] In the methods, the composition preferably comprises at least one of a proline, a betaine, an ACC deaminase or any combination thereof. In addition, the composition can comprise one or more bioactive priming polypeptide. For example, the composition can comprise a flagellin or flagellin associated polypeptide and at least one of a proline, a betaine, or an ACC deaminase. The abiotic stress can comprise heat stress, temperature stress, radiation stress, drought stress, cold stress, salt stress, nutrient-deficient stress, high metal stress, water stress, osmotic stress, or any combination thereof.

Balancing Immune Response with Plant Growth and Development

[0688] Although immune responses can provide protection of plants from pathogen attack, excessive immune responses can have negative impacts on plant growth. Therefore, balancing enhanced immunity or disease prevention and protection in a plant with an increased growth promoting response is a desired combination to optimize plant health.

[0689] Bioactive priming polypeptides that are useful for enhancing immune responses as described herein can be combined with polypeptides that provide positive impacts on plant growth and productivity. The polypeptide combinations are specifically selected for their distinct modes of action/regulation when applied to a plant or plant part. However, some of the bioactive priming polypeptides (Flg peptides such as Flg22, Flg15 and FlgII-28) are perceived by receptor-like proteins, followed by a process that initiates their entry and transport in the plant which results in functional outcomes while others are taken into the plant by active absorption. For example, the Flg-associated polypeptides such as Flg22, Flg15 and FlgII-28 are perceived by a leucine-rich receptor kinase located on the surface of the plasma membrane and involve a complex signaling pathway involved in the pathogen-triggered responses leading to immunity, disease resistance or disease prevention (Kutschmar et al. “PSKα promotes root growth in Arabidopsis,” New Phytologist 181: 820-831, 2009).

[0690] The bioactive priming polypeptides as described herein such as Flg22 polypeptides and thionins can act as elicitors and exhibit antimicrobial activity (e.g., anti-pesticide; bacterial, fungal, or viral activity). Specific combinations of polypeptides are provided, for example, the combination of flagellin and flagellin-associated bioactive priming polypeptides are useful for preventing and protecting plants from pathogenic diseases and serve a dual utility when they are applied together with those other polypeptides, for example, RHPP, serine proteases, glucanases and/or ACC deaminases, that enhance plant growth and productivity in a plant, plant part, and/or field of plants.

[0691] The bioactive priming compositions described herein can be applied exogenously as a foliar spray, in furrow treatment, soil application, seed treatment, drench or wash or endogenously to a plant to stimulate both the immune responsiveness and growth characteristics of the plant that collectively result in improved yield performance. They can also provide protection and growth benefits to the different parts of the plant (for example, leaves, roots, tubers, corms, rhizomes, bulbs, pseudobulbs, flowers, pods, fruits, and growing meristems).

[0692] Any of the bioactive priming compositions as described herein can be applied one or more times to a plant either in combination or individually to enhance growth and productivity of a plant. Multiple applications can be applied to promote yield benefits over the growing season with applications tailored to the conditions in the environment, for example if a period of hot and dry weather is expected during the growth season, an additional spray of bioactive priming polypeptides that promote growth under abiotic stress can alleviate negative impacts to the plant. Further, any of the individual components of a composition can be divided into separate compositions for separate application to the plant or plant part. For instance, when a composition comprises an inducer and a polypeptide, application of the “composition” to the plant or plant part does not require simultaneous administration. Instead, the inducer and the polypeptide can be applied separately in accordance with knowledge in the art.

[0693] For example, the methods herein comprise applying a composition comprising a polypeptide and an inducer. In certain instances, the inducer can be applied separately (e.g., before or after) the composition. For example, when the inducer comprises a bacteriocide (e.g., oxytetracycline), the inducer can be applied before or after the composition comprising the polypeptide.

### Bacterial Disease

[0694] Methods of using the bioactive priming compositions such as those containing the flagellin-associated polypeptides or the thionin-like polypeptides alone or in combination with an inducer compound as described herein are useful for the prevention, treatment and control of bacterial diseases in corn and particularly useful for the treatment of bacterial leaf streak disease in corn caused by Xanthomonas vasicola pv. vasculorum, also recognized as Xanthomnas campestris pv. vasculorum.

[0695] Surveys indicate that bacterial leaf streak disease has spread and may be widely distributed throughout the U.S. Corn Belt (Western Indiana, Illinois, Iowa, Missouri, Eastern Nebraska and Eastern Kansas). Disease spread is most prevalent where corn is planted on corn in crop rotation practices. The bacterial leaf streak disease can cause infection on dent corn (field) seed corn, popcorn and sweet corn. The symptoms on corn include narrow to brown yellow streaks and brown yellow strips between the leaf veins. Lesions usually develop on lower or older plant leaves and initially spread to the higher or younger leaves on the plant. Yellow discoloration also may be present around lesions.

[0696] The bacterial leaf streak disease of corn presumably survives in previously infected host debris. Bacterial exudates found on surfaces of infected leaf tissues can serve as secondary inocula. The bacterium is spread by wind, splashing rain, and possibly by irrigation water. The pathogen penetrates corn leaves through natural openings such as stomata, which can result in a banded pattern of lesions occurring across leaves. Colonization of leaf tissues apparently is restricted by main veins.

[0697] Because the disease is caused by a bacterial pathogen, the current use of bactericides is problematic to control it. For example, most bactericides act as contact products and are not systemic and thus they will not be absorbed or taken into the plant via other mechanisms. Bactericide treatments may require repeated applications as the bactericide may be washed off with rain or wind, thus rendering them uneconomical or impractical for use in some corn crops.

[0698] Current disease management practices to date recommend crop rotation practices (such as corn, soybean and then back to corn) and the implementation of sanitation practices, such as cleaning equipment between field usage to slow disease progression.

[0699] Foliar applications of bioactive priming compositions described herein that contain the Flg (Tables 4-5) and thionin polypeptides (Table 15) or combinations of the two classes provide an alternative approach for treating the disease. Foliar applications with these bioactive priming compositions provided as a spray to the leaf surface of either asymptomatic or symptomatic plants provides a means to prevent, treat, and control the bacterial leaf streak disease in corn.

[0700] Alternatively, bioactive priming compositions described herein that contain flagellin- and thionin bioactive priming polypeptides or combinations thereof can be useful for the prevention, treatment and control of other bacterial diseases that infect corn (Table 22). The compositions can comprise an inducer compound.

TABLE 22
Bacteria causing diseases in plants

| Crop(s) | Disease Name | Bacteria Causing Disease |
|---|---|---|
| Corn | Bacterial leaf blight and stalk rot | Pseudomonas avenae subsp. avenae |
| Corn | Bacterial leaf spot | Xanthomonas campestris pv. |
| | | holcicola |
| Corn | Bacterial leaf streak | Xanthomonas vasicola spp., |
| | | Xanthamonas vasicola pv. holcicola |
| Corn | Bacterial stalk rot | Enterobacter dissolvens; Erwinia |
| | | dissolvens |
| Corn | Bacterial stalk and top rot | Erwinia carotovora subsp. |
| | | carotovora |
| | | Erwinia chrysanthemi pv. zeae |
| Corn | Bacterial stripe | Pseudomonas andropogonis |
| Corn | Chocolate spot | Pseudomonas syringae pv. |
| | | coronafaciens |
| Corn | Goss's bacterial wilt and | Clavibacter michiganensis subsp. |
| | blight (leaf freckles and wilt) | nebraskensis; Corynebacterium |
| | | michiganense pv. nebraskense |
| Corn | Holcus leaf spot | Pseudomonas syringae pv. syringae |
| | | van Hall |
| Corn | Purple leaf sheath | Hemiparasitic bacteria |
| Corn | Seed rot-seedling blight | Bacillus subtilis |
| Corn | Stewart's disease (Stewart's | Pantoea stewartii |
| | bacterial wilt) | |
| Corn | Corn stunt (achapparramiento, | Spiroplasma kunkelii |
| | maize stunt, Mesa Central or | |
| | Rio Grande maize stunt) | |
| Citrus | Citrus greening; Huanglongbing | Candidatus liberibacter asiaticus |
| Citrus | Citrus canker | Xanthomonas citrii |
| Kiwi | Kiwi PSA disease | Pseudomonas syringae pv. actinidae |
| Flowering trees | Fireblight | Erwinia amylovora |
| (apple, pear, | | |
| almond, plum, | | |
| cherry) & | | |
| ornamental | | |
| plants | | |
| Grapevine, olive | Pierce's disease, bacterial leaf | Xylella fastidiosa |
| trees, | scorch | |
| Fruiting | Bacterial leaf spot, bacterial | Pseudomonas syringae spp., |
| vegetables, | speck disease, bunch rot, | pseudomonas syringae pv. tomato, |
| vines, stone | bacterial blossom | Pseudomonas syringae pv. |
| fruits, apple, pear | blast, blister spot, | Lachrymans 2, Pseudomonas |
| brassicacae, | bacterial blast | syringae pv. syringae, Pseudomonas |
| vegetables, nut | | syringae pv. maculicola |
| trees, peppers, | | |
| tomato | | |
| Banana | Blood disease | Ralstonia syzygii subsp. celebesenis |
| Cashew | Bacterial leaf and fruit spot, | Xanthamonas spp., Xanthamonas |
| | Bacterial leaf and nut spot | campestris pv. mangiferaeindicae, |
| | | Xanthomonas citri pv. anacardii) |
| Citrus | Citrus variegated chlorosis (CVC) | Xylella fastidiosa |
| Tomato, peppers | Bacterial leaf spot | Xanthomonas spp., Xanthamonas |
| | | campestris pv. vesicatoria |
| Walnuts | Walnut blight | Xanthomonas arboricola pv. |
| | | juglandis |
| Leafy green | Bacterial leaf spot, bacterial spot | Xanthamonas spp., Xanthamonas |
| vegetables, | | campestris pv. vesicatoria |
| lettuce, tomato, | | |
| peppers | | |

[0701] Alternatively, bioactive priming compositions and/or isolated polypeptides described herein can be useful for the prevention, treatment and control of fungal diseases that infect a wide variety of plants, such as those listed in Table 23 below.

TABLE 23
Fungal Diseases in Plants

| Crop(s) | Disease Name | Fungus Causing Disease |
|---|---|---|
| kiwifruit, grapes, citrus | Sooty mold | Cladosporium and |
| | | Alternaria species |
| soybean | Frog eye leaf spot | Cercospora sojina |
| soybean | Cercospora leaf blight; | Cercospora kikuchii |
| | Cercosporiosis, purple seed stain | |
| soybean | Asian soybean rust | Phakopsora pachyrhizi; |
| | | Phakopsora meibomiae |
| soybean | Target spot | Corynespora cassicola |
| soybean | Powdery mildew | Erysiphe diffusa |
| soybean | Septoria brown rot | Septoria glycines |
| soybean | Soybean stem canker | Diaporthe spp., Diaporthe |
| | | phasoleorum |
| soybean | Phomopsis pod, seed blight, seed | Phomopsis spp., Diaporthe |
| | decay | spp. |
| soybean | Charcoal rot | Macrophomina phaseolina |
| soybean | Leaf sheath blight, mela | Thanatephorus cucumeris |
| legumes, soybean, | White mold, Sclerotinia stem rot | Sclerotinia sclerotiorum |
| canola, leafy green | | |
| vegetables, fruiting | | |
| vegetables | | |
| corn | Grey leaf spot | Cercospora zeae-maydis; |
| | | Cercospora zeina |
| Corn, soybean | Aspergillus, Aspergillus rot | Aspergillus spp., Aspergillus |
| | | flavus, Aspergillus sojae |
| corn | Phaeosphaeria spot | Phaeosphaeria maydis |
| turf grass | Dollar spot | Sclerotinia homoeocarpa |
| citrus | Citrus black spot | Guignardia citricarpa; |
| | | Phyllosticta citricarpa |
| citrus, almond | Phytopthora root rot; Phytopthora | Phytopthora spp. |
| | foot rot; Phytopthora crown rot | Phytophthora citrophthora; |
| | | Phytopthora parasitica, |
| citrus | Citrus black rot | Alternaria citri |
| citrus | Post-bloom fruit drop | Colletotrichum acutatum; |
| | | Colletotrichum |
| | | gloeosporioides |
| turf grass | Gray leaf spot | Pyricularia grisea |
| almond, peach, cherry, | Brown rot; blossom blight | Monilinia laxa |
| apricot, plum, nectarine, | | |
| prune, stone fruits | | |
| almond, apricot, | Shot hole; coryneum disease; | Wilsonomyces carpophilus |
| nectarine, peach, prune, | gum spot | |
| cherry, stone fruits | | |
| potato, pulse crops, | White mold | Sclerotinia sclerotiorum |
| canola | | |
| canola, oilseed rape | Black leg | Leptosphaeria maculans |
| leafy greens | Cercospora leaf spot | Cercospora spp. |
| soybean | Sudden death syndrome | Fusarium virguliforme; |
| | | Fusarium brasilense; |
| | | Fusarium solani spp. |
| corn, soybean, leafy | Rhizoctonia seedling blight, | Rhizoctonia solani; |
| green vegetables, grains, | damping-off, root rot, seed rot | Rhizoctonia spp. |
| fruiting, vegetables, | | |
| potato | | |
| corn, soybean, leafy | Pythium seedling blight, | Pythium spp., Pythium |
| green vegetables, grains, | damping-off, root rot, seed rot, | sylvaticum, |
| fruiting, vegetables | stalk rot | |
| corn, soybean, leafy | Fusarium seedling blight, | Fusarium spp., Fusarium |
| green vegetables, grains, | damping-off, root rot, seed rot, | graminearum, Fusarium |
| fruiting, vegetables | stalk rot | moniliforme |
| sugarbeets | Cercospora leaf spot | Cercospora spp. |
| grapevine, pepper, | Powdery mildew | Erysiphe spp., Erysiphe |
| tomato, cucurbits, hops | | necator, Oidium |
| | | lycopersicum, Leveillula |
| | | taurica, Podosphaeria |
| | | macularis |
| leafy green vegetables | Downy mildew | Peronospora spp., Bremia |
| | | lactucae |
| wheat, barley, oats, | Fusarium head blight, scab | Fusarium spp., Fusarium |
| triticale | | graminearum |
| potato, tomato | Early blight | Alternaria solani |
| potato | Late blight | Phytopthora infestans |
| fruiting trees, nut trees, | Phytopthora root rot, crown rot | Phytopthora spp. |
| vines | | |
| corn, soybean, grains, | Phytopthora seedling wilt, root | Phytopthora spp. |
| leafy green vegetables, | rot, damping-off, stem rot | |
| fruiting vegetables | | |
| banana | Fusarium wilt, Panama disease, | Fusarium oxysporum; |
| | Panama disease tropical race 4 | Fusarium oxysporum f. sp. |
| | | cubense |
| banana | Black sigatoka, black leaf streak | Mycosphaerella fijiensis; |
| | disease | Pseudocercospora fijiensis |
| banana | Yellow sigatoka | Pseudocercospora musicola |
| rice | Rice blast, rice rotten neck, rice | Magnaporthe oryzae; |
| | seedling blight, pitting disease, | Magnaporthe grisea |
| | Johnson spot | |
| rice | Rice sheath blight | Rhizoctonia solani |
| rice | Seedling rot | Pythium spp. |
| hops | Downy mildew | Pseudoperonospora humuli |
| legumes, leafy green | Grey mold | Bortrytis spp., Bortrytis |
| vegetables, grapevine, | | cinerea |
| strawberry | | |
| corn, wheat | Rust, polishing rust. Southern rust | Puccinia spp., Puccinia |
| | | polysora, Puccinia sorghi, |
| | | Puccinia recondita |
| wheat, fruiting | Speckled leaf spot, Septoria leaf | Septoria spp. |
| vegetables | spot, Stagonospora nodorum | |
| | blotch, Septoria tritici blotch | |
| cotton, cucurbits | Target spot, Corynespora leaf | Corynespora spp., |
| | spot, Corynespora blight | Corynespora cassiicola |
| cucurbits | Gummy stem blight | Didymella bryoniae |
| corn | Southern corn leaf blight | Cochliobolus |
| | | heterostrophus |
| corn | Northern corn leaf blight | Setosphaeria turcica, |
| | | Exserohilum turcicum |
| corn, soybean, leafy | Anthracnose, Anthracnose leaf | Colletotrichum spp., |
| green vegetables, | blight, Anthracnose stalk rot, top- | Colletotrichum graminicola, |
| fruiting vegetables, | kill, die-back | Colletotrichum truncatum |
| legumes, cucurbits, | | |
| fruiting trees, nut trees, | | |
| grains | | |
| turf grass | Brown patch | Rhizoctonia spp., |
| | | Rhizoctonia solani |
| sunflower | Downy mildew | Plasmopara halstedii |
| coffee | Coffee rust, coffee leaf rust | Hemileia vastatrix |
| coffee | Cercospora Leaf Spot | Cercospora spp. |
| grapevine | Witches broom disease | Moniliopthora perniciosa, |
| apple | Alternaria blotch, leaf spot | Alternaria mali |
| apple | Glomerella leaf spot and fruit rot, | Colletotrichum spp. |
| | bitter rot | |
| cocoa | Witches broom disease | Moniliopthora perniciosa, |
| | | Moniliopthora roreri |
| cocoa | Black pod disease, cocao stem | Phytopthora spp., |
| | canker, seedling blight, nursery | Phytopthora megakarya, |
| | blight | Phytopthora palmivora, |
| | | Phytopthora capsici |
| cocoa | Anthracnose | Colletotrichum |
| | | aeschynomenes |
| cashew | Anthracnose, Anthracnose blight | Glomerella cingulata, |
| | | Colletotrichum spp. |
| cashew | Powdery mildew | Erysiphe quericcola |
| coconut | Stem bleeding disease | Chalara paradoxa, |
| | | Theilanopsis paradoxa, |
| | | Ceratocystis paradoxa |
| coconut | Postharvest stem-end rot | Pestalotiopsis adusta, |
| | | Lasiodiplodia spp. |
| grapevine | Anthracnose | Elsino\ddot{e} ampelina, |
| | | Sphaceloma ampelinum |
| grapevine | Botrytis, Noble rot | Botrytis cinereal, |
| | | Bortryotinia fuckeliana |
| grapevine | Downy mildew | Plasmopara viticola |
| grapevine | Powdery mildew | Erysiphe necator, Uncinula |
| | | necator |
| grapevine | Grape leaf rust | Phakopsora euvitis |
| Grapevine | Summer Sour Rot | Aspergillus niger, Alternaria |
| | | spp, Cladosporium |
| | | herbarum, Rhizopus |
| | | arrhizus, Penicillium spp. |
| mango | Anthracnose | Glomerella cingulata, |
| | | Colletotrichum |
| | | gloeosporioides, |
| | | Colletotrichum karstii |
| mango | Mango sudden decline, sudden | Ceratocystis fimbriata |
| | wilt | |
| mango | Mango malformation disease | Fusarium sterilihyphosum |
| mango | Powdery mildew | Oidium mangiferae |
| mango | Stem-end rot | Dothiorella dominicana, |
| | | Phomopsis spp., |
| | | Botryodiplodia theobromae, |
| | | Lasiodiplodia theobromae |
| Mango | Mango Scab | Elsino\ddot{e} mangiferae |
| Mango | Sooty Mold | Meliola mangiferae, |
| | | Capnodium mangiferae, |
| | | Capnodium ramosum, |
| | | Tricospermum acerinum |
| almond, nut trees | Hull rot | Rhizophus stolofiner, |
| | | Monthnia spp. |
| apple | Apple scab disease, Black spot | Venturia inaequalis |
| apple | Powdery mildew | Podosphaeria leucotricha |
| stone fruits | Peach leaf curl | Taphrina deformans |
| leafy green vegetables, | Lettuce leaf spot | Cercopsora spp., |
| lettuce | | Cercospora lactucae-sativae |
| leafy green vegetables, | Downy mildew | Bremia lactucae |
| lettuce | | |
| turf grass | Snow mold, Fusarium patch | Microdochium nivale |

### Cercospora Leaf Blight Disease of Soybean

[0702] Cercospora is a fungal pathogen that causes the disease Cercospora leaf blight of soybean. Cercospora leaf blight also referred to as the purple seed stain disease infects both the leaves and seeds of soybeans. Cercospora infection of soybean seeds diminishes seed appearance and quality. The causal organism of Cercospora leaf blight is Cercospora kikuchii, which overwinters in soybean residue and in the seed coats. Spread of the disease occurs when the spores from the fungus are spread to soybean plants from infected residue, weeds or other infected soybean plants. Disease spread and symptom development are accelerated during periods of warm and wet weather. Symptom development usually begins after flowering and appears as circular lesions on soybean leaves as reddish brown to purple spots that can merge to form lesions. Symptoms are apparent in the upper canopy, usually in the uppermost three or four trifoliate leaves. Infected soybean plants exhibit worsening symptoms as the crop matures, and premature defoliation of affected leaves may occur during pod-fill. Cercospora symptom development may also appear as lesions on stems, leaf petioles and pods. Seeds are infected through the attachment to the pod. Cercospora infected seeds show a purple discoloration, which can appear as specks or blotches covering the entire seed coat. Other Cercospora diseases of soybean are Frogeye leaf spot caused by Cercospora sojina which can cause premature leaf drop and yield loss.

[0703] Foliar applications of bioactive priming compositions containing flagellin or flagellin-associated polypeptides (Tables 4-5) and an inducer compound provide an alternative approach for treating the disease. Foliar applications with these bioactive priming compositions provided as a spray to the leaf surface of either asymptomatic or symptomatic plants provides a means to prevent, treat, and control Cercospora leaf blight in soybeans. Foliar applications of Flg22 derived from Bacillus thuringiensis, particularly at high use rates (e.g., 4.0 Fl. oz/Ac), can provide a means of managing early symptom development and provide healthier more vigorous soybean plants grown in field locations that have been impacted by Cercospora.

[0704] Specific compositions that can be useful for treating or reducing the symptoms of Cercospora can comprise a flagellin or flagellin-associated polypeptide having an amino acid sequence comprising SEQ ID NO 226, 571, 587 or 590; an RHPP polypeptide having a sequence comprising SEQ ID NO: 604; or a combination of a flagellin associated polypeptide having an amino acid sequence comprising any one of SEQ ID NOs 226, 587 and 590 and an RHPP polypeptide having the amino acid sequence comprising SEQ ID NO: 604. The compositions can further comprise an inducer compound. The inducer compound can comprise β-aminobutyric acid, a callose synthase inhibitor, salicylic acid, oxalic acid or any combination thereof. For example, the inducer compound can comprise β-aminobutyric acid or a callose synthase inhibitor. The callose synthase inhibitor can comprise 2-DDG.

[0705] For example, a useful combination of bioactive priming polypeptides for treating, or reducing the symptoms of Cercospora on a plant or plant part is a flagellin polypeptide having an amino acid sequence comprising SEQ ID NO: 226 alone or in combination with an RHPP polypeptide having an amino acid sequence comprising SEQ ID NO: 604. The compositions can further comprise an inducer compound. The inducer compound can comprise β-aminobutyric acid, a callose synthase inhibitor, salicylic acid, oxalic acid or any combination thereof. For example, the inducer compound can comprise β-aminobutyric acid or a callose synthase inhibitor. The callose synthase inhibitor can comprise 2-DDG. Additional treatments can further comprise a fungicide in combination with these bioactive priming polypeptides.

### Asian Soybean Rust Disease

[0706] Asian soybean rust is a fungal disease caused by Phakopsora pachyrhizi. Its etiology and symptoms are similar to Cercospora and the bioactive priming polypeptide combinations useful for treating it are similar as well. Specifically, combinations of bioactive priming polypeptides that can be useful for treating or reducing the symptoms of Asian soybean rust include: a flagellin or flagellin-associated polypeptide having an amino acid sequence comprising SEQ ID NO 226, 571, 587 or 590; an RHPP polypeptide having a sequence comprising SEQ ID NO: 604; or a combination of a flagellin associated polypeptide having an amino acid sequence comprising any one of SEQ ID NOs 226, 587, 571 and 572 and an RHPP polypeptide having the amino acid sequence comprising SEQ ID NO: 604. The compositions can further comprise an inducer compound.

[0707] For example, a useful combination of bioactive priming polypeptides for treating, or reducing the symptoms of Asian soybean rust on a plant or plant part is a flagellin polypeptide having an amino acid sequence comprising SEQ ID NO: 226 alone or in combination with an RHPP polypeptide having an amino acid sequence comprising SEQ ID NO: 604. The compositions can further comprise an inducer compound. The inducer compound can comprise 3-aminobutyric acid, a callose synthase inhibitor, salicylic acid, oxalic acid or any combination thereof. For example, the inducer compound can comprise β-aminobutyric acid or a callose synthase inhibitor. The callose synthase inhibitor can comprise 2-DDG. Additional treatments can further comprise a fungicide in combination with these bioactive priming polypeptides.

### Holcus Spot

[0708] Holcus spot is a bacterial disease caused by Pseudomonas syringae pv. actinidae. Methods are described herein for using flagellin or flagellin associated polypeptides to restrict growth of P. syringae and thus prevent or treat the disease of Holcus spot in a plant or a plant part. Compositions comprising a flagellin or flagellin associated polypeptides having amino acid sequences comprising any one of SEQ ID NOs: 226, 540, 587, 571 and 572 or any combination thereof are useful for the treatment of P. syringae. The compositions can further comprise an inducer compound. The inducer compound can comprise β-aminobutyric acid, a callose synthase inhibitor, salicylic acid, oxalic acid or any combination thereof. For example, the inducer compound can comprise β-aminobutyric acid or a callose synthase inhibitor. The callose synthase inhibitor can comprise 2-DDG.

### Sclerotinia Stem Rot (White Mold) Disease

[0709] Sclerotinia sclerotiorum is a plant pathogenic fungus that causes a disease caused white mold. It is also known as cottony rot, water soft rot, stem rot, drop, crown rotand blossom blight. Diagnostic symptoms of the white rot include black resting structures known as sclerotia and white fuzzy growths of mycelium on the infected plant. The sclerotia, in turn, produce a fruiting body that produces spores in a sac. Sclerotinia can affect herbaceous, succulent plants, particularly fruits and vegetables, or juvenile tissue on woody ornamentals. It can also affect legumes or tuberous plants like potatoes. White mold can affect a host at any stage of growth, including seedlings, mature plants, and harvested products. It is usually found on tissues with high water content and close proximity to soil. Left untreated, pale to dark brown lesions on the stem at the soil line are covered by a white, fluffy mycelial growth. This affects the xylem which leads to chlorosis, wilting, leaf drop, and death. White mold can also occur on fruit in the field or in storage and is characterized by white fungal mycelium covering the fruit and its subsequent decay. Compositions comprising a flagellin or flagellin associated polypeptides having amino acid sequences comprising any one of SEQ ID NOs: 226, 540, 571, 587, and 590 are useful for the treatment of Sclerotinia sclerotiorum. The compositions can further comprise an inducer compound. The inducer compound can comprise β-aminobutyric acid, a callose synthase inhibitor, salicylic acid, oxalic acid or any combination thereof. For example, the inducer compound can comprise β-aminobutyric acid or a callose synthase inhibitor. The callose synthase inhibitor can comprise 2-DDG.

### Pseudomonas Leaf Spot

[0710] Pseudomonas syringae pv. actinidiae (PSA) is a devastating plant pathogen causing bacterial canker of both green- (Actinidiae deliciosa) and yellow-flesh (Actinidiae chinesis) kiwi plants throughout zones of kiwi production, causing severe harvest loss in New Zealand, China, and Italy. In New Zealand alone, cumulative revenue losses to the most devastating biovar PSA-V are predicted to approach $740 million New Zealand leaves Dollars (NZD) by 2025 (Agribusiness and Economics Research Institute of Lincoln University “The Costs of Psa-V to the New Zealand Kiwifruit Industry and the Wider Community”; May 2012). PSA-V colonizes the outer and inner surfaces of the kiwi plant and can spread through the xylem and phloem tissues. Disease symptoms of PSA-V on kiwi include bacterial leaf spot, bacterial canker of the trunk, red exudates, blossom rot, discoloration of twigs, and ultimately dieback of kiwi vines. The standard method of control for PSA-V currently employs frequent foliar applications of metallic copper to kiwi vines which is predicted to lead to the selection of copper-resistant form of the pathogen and loss of disease control. Novel methods of control are urgently needed.

[0711] Compositions comprising a Flagellin or flagellin associated peptides having amino acid sequences comprising SEQ ID NO: 226, 540, 752, and/or 571 are useful for the treatment of Pseudomonas syringae, particularly in kiwis. The compositions can further comprise an inducer compound. The inducer compound can comprise β-aminobutyric acid, a callose synthase inhibitor, salicylic acid, oxalic acid or any combination thereof. For example, the inducer compound can comprise β-aminobutyric acid or a callose synthase inhibitor. The callose synthase inhibitor can comprise 2-DDG.

### Asian Citrus Greening (Huanglonging) Disease

[0712] The compositions described herein are particularly suited to treating Asian citrus greening (Huanglonging) Disease. The methods described herein incorporate a different approach to combating disease and additionally providing benefits of increasing the overall productivity of a plant. This approach is specifically directed to providing either exogenous or endogenous applications of the compositions comprising a polypeptide and/or inducer compound as described herein to combat disease in plants.

[0713] The compositions comprising a polypeptide and/or inducer compound as described herein are useful for the prevention, treatment and control of Asian citrus greening also referred to as Huanglonging (HLB) disease, a devastating disease for citrus. HLB disease is widely distributed and has been found in most commercial and residential sites in all counties that have commercial citrus orchards.

[0714] Methods are described herein for using compositions comprising a bioactive polypeptide described herein in combination with an inducer compound to prevent the spread of and in the treatment of HLB disease. For example, the method can comprise using a flagellin or flagellin associated polypeptide in combination with 2-DDG, β-aminobutyric acid, benzothiazole, oxytetracycline, cysteine, betaine, salicylic acid, oxalic acid or any combination thereof to prevent the spread of and in the treatment of HLB disease.

[0715] Asian citrus greening disease is transmitted by the Asian citrus psyllid, Diaphorina citri or the two-spotted citrus psyllid, Trioza erytreae Del Guercio, which are both characterized as sap-sucking, hemipteran bug(s) in the family Psyllidae and have been implicated in the spread of citrus greening, a disease caused by a highly fastidious phloem-inhabiting bacteria, Candidatus Liberibacter asiaticus (Halbert, S. E. and Manjunath, K. L, “Asian citrus psyllids Sternorrhyncha: Psyllidae and greening disease of citrus: A literature review and assessment of risk in Florida,” Florida Entomologist 87: 330-353, 2004). Asian citrus greening or Huanglongbing disease is considered fatal for a citrus tree once the tree becomes infected.

[0716] The early symptoms of the disease on leaves are vein yellowing and an asymmetrical chlorosis referred to as blotchy mottle, which is the most diagnostic symptom of the disease. Infected trees are stunted and sparsely foliated with a blotchy mottling appearing on the foliage. Early symptoms of yellowing may appear on a single shoot or branch and with disease progression, the yellowing can spread over the entire tree. Afflicted trees may show twig dieback, and fruit drop. Fruit are often few in number, small, deformed or lopsided and fail to color properly, remaining green at the end and display a yellow stain just beneath the peduncle (stem) on a cut fruit.

[0717] The Asian citrus greening disease may also be graft transmitted when citrus rootstocks are selected for and grafted to scion varieties.

[0718] Management of citrus greening disease has proven difficult and therefore current methods for control of HLB have taken a multi-tiered integrated disease and pest management approach using 1) the implementation of disease-free nursery stock and rootstock used in grafting, 2) the use of pesticides and systemic insecticides to control the psyllid vector, 3) the use of biological control agents such as antibiotics, 4) the use of beneficial insects, such as parasitic wasps that attack the psyllid, and 5) breeding for new citrus germplasm with increased resistance to the citrus greening causing bacteria (Candidatus Liberibacter spp.). The use of cultural and regulatory measures to prevent the spread of the disease is also part of the integrated management approach. Many aspects involved in the management of citrus greening are costly both monetarily and in respect to losses in citrus production.

[0719] Interveinal application of a thionin polypeptide or mixture of thionin polypeptides can be delivered directly into the phloem (e.g., phloem cells including phloem sap, phloem companion cells and phloem sieve tube elements) where Candidatus Liberibacter can reside.

[0720] The thionins can be produced using an expression system where they can be fused to a phloem targeting sequence(s) (Table 14) and then uniquely delivered to the same vicinity where the bacteria can reside in the citrus plant.

[0721] The phloem targeted thionin bioactive priming polypeptides are useful for treating citrus plants to prevent, reduce or eliminate the spread of the Asian citrus greening disease or Huanglonging (HLB) by directly targeting the bacterium, Candidatus Liberibacter asiaticus.

[0722] These phloem targeted thionins can be delivered by injection into the phloem of a shrub or tree. Additionally, they can be delivered by spraying, washing, or adding as a soak or a drench to the soil or area surrounding a plant.

[0723] Any of the phloem targeting sequences (Table 14; SEQ ID NOs: 611-619) can be used in combinations with the thionin and thionin-like polypeptides (Table 15; SEQ ID NOs: 620-719).

[0724] The bacteria that cause HLB, Candidatus Liberibacter asiaticus is difficult to isolate and culture. In order to test individual thionins and thionins with the phloem targeting sequences to determine if they are useful for the treatment of HLB disease, Agrobacterium tumefaciens can be used as a model organism to test the effectiveness on reducing the cell titer or growth of Agrobacterium prior to using the thionin or thionin combinations in an orchard setting.

[0725] The “peptide priming” methods provided herein with the thionins and/or thionin-like polypeptides (Table 15) can also be used in combination with flagellin and flagellin-associated polypeptides (Tables 1-5). Combinations of the thionin- and flagellin-associated bioactive priming polypeptides can be used to prophylactically pre-treat a citrus plant by applying the bioactive priming polypeptide or a composition containing the polypeptide prior to the onset or appearance of any infection-related symptoms on the citrus shrubs or trees. This pretreatment increases resistance to the disease pathogen that causes citrus greening (Candidatus Liberibacter spp.).

[0726] The thionins provided in combination with the flagellin associated bioactive priming polypeptides provide a more comprehensive approach to disease prevention and management. The thionin and flagellin associated bioactive priming polypeptides use two distinct modes of action to prevent disease and the spread of disease.

[0727] The thionin-flagellin bioactive priming polypeptide combinations can also be used with any other integrated management approach for disease control prescribed for HLB including, but are not limited to, (1) the use of disease-free nursery stock and/or rootstocks for grafting, (2) the use of pesticides and/or systemic insecticides to control the disease-causing psyllid, (3) the use of biological control agents such as injections of antibiotics or parasitic insects that controls the psyllid, (4) breeding new varieties of citrus germplasm with increased resistance to the bacteria responsible for Asian citrus greening disease, (5) controlling parasitic plants (for example, dodder) that may spread the disease, or (6) any combination thereof.

[0728] A synthetic version of a phloem targeting polypeptide (SEQ ID NO: 611) is particularly useful in targeting anti-microbial polypeptides to the phloem sieve tube and companion cells and can be useful for treating various bacterial diseases of plants, such as bacterial leaf streak, Asian citrus greening or Huanglonging and citrus canker.

[0729] In addition, flagellin or flagellin associated polypeptides are useful for treating Asian citrus greening, especially when used in combination with a bacteriocide. For instance, flagellin or flagellin associated polypeptides having amino acid sequences comprising any one of SEQ ID NOs: 226, 571 can be used. Preferably, the bacteriocide comprises oxytetracycline.

[0730] Other compositions that are useful against these diseases include “enzyme recovery mixes” comprising a β-1,3-endoglucanase, an α-amylase, an L-cysteine and 2-DDG with or without a flagellin or flagellin associated polypeptide. For example, a suitable composition can comprise a β-1,3-endoglucanase having an amino acid sequence comprising any one of SEQ ID NOs: 731-733 and 767-776, an α-amylase having an amino acid sequence comprising SEQ ID NO: 734 or 735, an L-cysteine and 2-DDG. The composition can further comprise a flagellin or flagellin associated polypeptide. The flagellin or flagellin associated polypeptide can have an amino acid sequence comprising SEQ ID NO: 226 or 571.

### Citrus Canker

[0731] “Peptide priming” methods were developed for use with the the compositions comprising a polypeptide and/or inducer compound as described herein to prophylactically treat citrus plants prior to any visible symptoms of the citrus canker disease or as a treatment once the onset of disease symptoms become apparent.

[0732] Citrus canker occurs primarily in tropical and sub-tropical climates and has been reported to occur in over thirty countries including spread of infection reported in Asia, Africa, the Pacific and Indian Oceans Islands, South America, Australia, Argentina, Uruguay, Paraguay, Brazil and the United States. Citrus canker is a disease caused by the bacterium, Xanthomonas axonopodis pv. citri or pv. aurantifolii (also referred as Xanthomonas citri subsp. citri) that infect foliage, fruit and young stems. Symptoms of citrus canker infection on leaves, and fruit of the citrus shrubs/trees can result in leaf-spotting, leaf lesions, defoliation, die back, deformation of fruit, fruit rind-blemishing, pre-mature fruit drop, and canker formation on leaves and fruits. Diagnostic symptoms of citrus canker include a characteristic yellow halo that surrounds the leaf lesions and a water-soaked margin that develops around the necrotic tissue on the leaves of the citrus plant. The citrus canker pathogen can spread through the transport of infected fruit, plants, and equipment. Dispersal can also be facilitated by the wind and rain. Overhead irrigation systems may also facilitate movement of the citrus canker causing pathogen. Infected stems can harbor the citrus canker causing bacteria (Xanthomonas axonopodis pv. citri) in the stem lesions for transmission to other citrus plants. Insects, such as the Asian leaf miner (Phyllocnistis citrella) also disseminate the disease.

[0733] In general, citrus plants susceptible to the citrus canker disease include orange, sweet orange, grapefruit, pummelo, mandarin tangerine, lemon, lime, swingle acid lime, palestine sweet lime, tangerine, tangelo, sour orange, rough lemon, citron, calamondin, trifoliate orange and kumquat. World-wide, millions of dollars are spent annually on prevention, sanitation, exclusion, quarantine and eradication programs to control citrus canker (Gottwald T. R. “Citrus Canker,” The American Phytopathological Society, The Plant Health Instructor 2000/updated in 2005). Treatment for the disease has included application of antibiotics or disinfectants, the use of copper-based bactericidal sprays, and pesticide applications for Asian leaf miner control.

[0734] The compositions comprising a polypeptide and/or inducer compound as described herein can be applied to a citrus plant or citrus plant part (e.g., rootstock, scion, leaves, roots, stems, fruit, and foliage) using application methods that can comprise: spraying, inoculating, injecting, soaking, infiltrating, washing, dipping and/or provided to the surrounding soil as an in furrow treatment.

[0735] The methods are provided using the compositions comprising a polypeptide and/or inducer compound as described herein to pre-treat citrus plants or citrus plant parts (e.g., root stock, scion, leaves, roots, stems, fruit, and foliage) prior to any visible occurrence of symptoms. They are also useful for providing an increase in resistance to the citrus canker pathogen resulting in a reduction in disease symptoms.

[0736] Additionally, the methods of using the compositions comprising a polypeptide and/or inducer compound as described herein are useful to treat citrus plants or citrus plant parts (e.g., root stock, scion, leaves, roots, stems, fruit, and foliage) once the early onset of citrus canker disease symptoms or when the symptoms of the disease become apparent.

[0737] Application of the compositions comprising a polypeptide and/or inducer compound as described herein for treating citrus plants to prevent, reduce or eliminate the spread of the citrus canker disease can be delivered by injecting into the phloem of a shrub, tree, or vine; and/or by spraying, washing, adding as a soak or a drench to the soil or soil area surrounding a plant or provided in furrow.

[0738] The compositions comprising a polypeptide and/or inducer compound as described herein can be applied as a foliar treatment or spray or as an injection and are useful for the prevention of infestation of citrus plants from insects such as the Asian leaf miner (Phyllocnistis citrella) that have been identified in the dissemination of the bacteria (Xanthomonas axonopodis pv. citri) that cause the citrus canker disease.

### Sooty Mold

[0739] Sooty mold infection can occur on plant surfaces including fruit, leaves or other plant parts exposed to various Ascomycete fungi, such as Cladosporium and Alternaria species. Symptoms include dark spots and stained areas on the surface of the plant or plant part, with possible visible mold growth, including filamentous or spore-laden patches. Fruit including but not limited to kiwifruit, oranges, grapes, as well as pecan and hickory trees and ornamental plants are particularly susceptible to sooty mold growth. These blemishes are primarily a cosmetic issue but reduce the marketability of fruit. Mold growth is often caused by sucking insects that feed on fruit or other plant parts and then excrete sugary secretions known as honeydew onto plant surfaces. The fungi are then able to colonize the surfaces with honeydew available. Sooty mold is estimated to result in a $50 million production loss to the New Zealand kiwifruit industry annually. While sooty mold can be washed off fruit post-harvest, processing limitations make it unfeasible to apply liquid products to fruit after they are picked. Thus, there is a need for treatments that can be applied pre-harvest to remove sooty mold from fruit or prevent it from growing. Compositions comprising a polypeptide and/or inducer compound as described herein can be applied as a foliar treatment or spray or fruit wash for prevention or sooty mold growth or removal of sooty mold. For instance, glucanases (SEQ ID NO: 731-733 and 767-776), chitinases (SEQ ID NO: 777-778), and serine proteases (SEQ ID NO: 721, 722, and 794-796) are useful for reducing sooty mold growth on kiwifruit.

### Citrus Plants

[0740] Any of the methods described herein to provide improved plant health, disease tolerance or disease treatment applications to treat or prevent Asian citrus greening (HLB) or citrus canker are suitable for use with any citrus plants and shrubs/trees.

[0741] The compositions comprising a polypeptide and/or inducer compound as described herein can be applied to any citrus shrub and/or tree and to any agronomically-important citrus hybrid or citrus non-hybrid plant and are useful for prophylactically treating the citrus to prevent the onset of an infection or providing treatment after an infection has occurred.

[0742] Citrus plant species for use of the methods described herein can comprise any plant of the genus Citrus, family Ruttaceae, and include, but are not limited to: Sweet orange also known as Hamlin or Valencia orange (Citrus sinensis, Citrus maxima x Citrus reticulata), Bergamot Orange (Citrus bergamia, Citrus limetta x Citrus aurantium), Bitter Orange, Sour Orange, or Seville Orange (Citrus aurantium, Citrus maxima x Citrus reticulata), Blood Orange (Citrus sinensis), Orangelo or Chironja (Citrus paradisi x Citrus sinensis), Mandarin Orange (Citrus reticulate), Trifoliate Orange (Citrus trifoliata), Tachibana Orange (Citrus tachibana), Alemow (Citrus macrophylla), Clementine (Citrus clementina), Cherry Orange (Citrus kinokuni), Lemon (Citrus limon, or hybrids with Citrus maxima x Citrus medica) or Citrus limonia, Indian Wild Orange (Citrus indica), Imperial Lemon (Citrus limon, Citrus medica x Citrus paradisi), Lime (Citrus latifoli, Citrus aurantifolia), Meyer Lemon (Citrus meyeri); hybrids of Citrus x meyeri with Citrus maxima, Citrus medica, Citrus paradisi and/or Citrus sinensis), Rough Lemon (Citrus jambhiri), Volkamer Lemon (Citrus volkameriana), Ponderosa Lemon (Citrus limon x Citrus medica), Key Lime (Citrus aurantiifolia), Kaffir Lime (Citrus hystrix or Mauritius papeda), Sweet Lemon, Sweet Lime, or Mosambi (Citrus limetta), Persian Lime or Tahiti Lime (Citrus latifolia), Palestine Sweet Lime (Citrus limettioides), Winged Lime (Citrus longispina), Australian Finger Lime (Citrus australasica), Australian Round Lime (Citrus australis), Australian Desert or Outback Lime (Citrus glauca), Mount White Lime (Citrus garrawayae), Jambola (Citrus grandis), Kakadu Lime or Humpty Doo Lime (Citrus gracilis), Russel River Lime (Citrus inodora), New Guinea Wild Lime (Citrus warburgiana), Brown River Finger Lime (Citrus wintersii), Mandarin Lime (Citrus limonia; (hybrids with Citrus reticulata x Citrus maxima x Citrus medica), Carabao Lime (Citrus pennivesiculata), Blood Lime (Citrus australasica x Citrus limonia) Limeberry (Triphasia brassii, Triphasia grandifolia, Triphasia trifolia), Lemon hybrid or Lumia (Citrus medica x Citrus limon), Omani Lime (Citrus aurantiifolia, Citrus medica x Citrus micrantha), Sour Lime or Nimbuka (Citrus acida), Grapefruit (Citrus paradisi; Citrus maxima x Citrus x sinensis), Tangarine (Citrus tangerina), Tangelo (Citrus tangelo; Citrus reticulata x Citrus maxima or Citrus paradisi), Minneola Tangelo (Citrus reticulata x Citrus paradisi), Orangelo (Citrus paradisi x Citrus sinensis), Tangor (Citrus nobilis; Citrus reticulata x Citrus sinensis), Pummelo or Pomelo (Citrus maxima or Citrus retkulata), Citron (Citrus medica), Mountain Citron (Citrus halimii), Kumquat (Citrus japonica or Fortunella species), Kumquat hybrids (Calamondin, Fortunella japonica; Citranqequat, Citrus ichangensis; Limequat, Citrofortunella floridana); Orangequat, hybrid between Satsuma mandarin x Citrus japonica or Fortunella species; Procimequat, Fortunella hirdsiie; Sunquat, hybrid between Citrus meyeri and Citrus japonica or Fortunella species; Yuzuquat, hybrid between Citrus ichangensis and Fortunella margarita), Papedas (Citrus halimii, Citrus indica, Citrus macroptera, Citrus micrantha), Ichang Papeda (Citrus ichangensis), Celebes Papeda (Citrus celebica), Khasi Papeda (Citrus latipes), Melanesian Papeda (Citrus macroptera), Ichang Lemon (Citrus ichangensis x Citrus maxima), Yuzu (Citrus ichangensis x Citrus reticulata), Cam sành (Citrus reticulata x Citrus maxima), Kabosu (Citrus sphaerocarpa), Sudachi (Citrus sudachi), Alemow (Citrus macrophylla), Biasong (Citrus micrantha), Samuyao (Citrus micrantha), Kalpi (Citrus webberi), Mikan (Citrus unshiu), Hyuganatsu (Citrus tamurana), Manyshanyegan (Citrus mangshanensis), Lush (Citrus crenatifolia), Amanatsu or Natsumikan (Citrus natsudaidai), Kinnow (Citrus nobilis x Citrus deliciosa), Kiyomi (Citrus sinensis x Citrus unshiu), Oroblanco (Citrus maxima x Citrus paradisi), Ugh (Citrus reticulata x Citrus maxima and/or Citrus x paradisi), Calamondin (Citrus reticulata x Citrus japonica), Chinotto (Citrus myrtifolia, Citrus aurantium or Citrus pumila), Cleopatra Mandarin (Citrus reshni), Daidai (Citrus aurantium or Citrus daidai), Laraha (Citrus aurantium), Satsuma (Citrus unshiu), Naartjie (Citrus reticulata x Citrus nobilis), Rangpur (Citrus limonia; or hybrid with Citrus sinensis x Citrus maxima x Citrus reticulata), Djeruk Limau (Citrus amblycarpa), Iyokan, anadomikan (Citrus iyo), Odichukuthi (Citrus odichukuthi), Ougonkan (Citrus flaviculpus), Pompia (Citrus monstruosa), Tangerine (Citrus tangerine), Taiwan Tangerine (Citrus depressa), Shonan gold (Citrus flaviculpus or Citrus unshiu), Sunki (Citrus sunki), Mangshanyen (Citrus mangshanensis, Citrus nobilis), Clymenia (Clymenia platypoda, Clymenia polyandra), Jabara (Citrus jabara), Mandora (Mandora cyprus), Melogold (Citrus grandis x Citrus paradisii/Citrus maxima/Citrus grandis), Shangjuan (Citrus ichangensis x Citrus maxima), Nanfengmiju (Citrus reticulata), and Shīkwāsaī (Citrus depressa)

[0743] The compositions comprising a polypeptide and/or inducer compound as described herein can be applied to any citrus plant, shrub/tree used for medicinal or cosmetic/health and beauty purposes, such as Bergamot Orange (Citrus bergamia), Sour or Bitter Orange (Citrus aurantium), Sweet Orange (Citrus macrophylla), Key Lime (Citrus aurantiifolia), Grapefruit (Citrus paradisi), Citron (Citrus medica), Mandarin Orange (Citrus reticulate), Lemon (Citrus limon, or hybrids with Citrus medica x Citrus maxima, Citrus limonia, Citrus medica x Citrus maxima x Citrus medica), Sweet Lime (Citrus limetta), Kaffir Lime, (Citrus hystrix or Mauritius papeda), Lemon hybrid or Lumia (Citrus medica x Citrus limon, Omani Lime (Citrus aurantiifolia, Citrus medica x Citrus micrantha), Jambola (Citrus grandis), Kakadu Lime or Humpty Doo Lime (Citrus gracilis), Pomelo (Citrus maxima), Tangor (Citrus nobilis), and Sour Lime or Nimbuka (Citrus acida).

[0744] Exemplary important citrus hybrids for fruit production are: Sweet Orange (Citrus sinensis), Bitter Orange (Citrus aurantium), Grapefruit (Citrus paradisi), Lemon (Citrus limon), Persian Lime (Citrus latifolia), Key Lime (Citrus aurantiifolia), Tangerine (Citrus tangerine) and Rangpur (Citrus limonia).

[0745] Additionally, any the compositions comprising a polypeptide and/or inducer compound as described herein can be applied to any citrus plant, shrub/tree used as a rootstock and/or a scion germplasm. The methods are particularly useful for rootstocks commonly used in grafting of citrus to enhance the merits of the scion varieties, which can include tolerance to drought, frost, disease or soil organisms (for example, nematodes). Such citrus plants that provide useful rootstocks include: Sour or Bitter Orange (Citrus aurantium), Sweet Orange (Citrus macrophylla), Trifoliate Orange (Poncirus trifoliata), Rough Lemon (Citrus jambhiri), Volkamer Lemon (Citrus volkameriana), Alemow (Citrus macrophylla), Cleopatra Mandarin (Citrus reshini), Citrumelo (hybrids with x citroncirus species), Grapefruit (Citrus paradisi), Rangpure Lime (Citrus limonia), Palestine Sweet Lime (Citrus limettioides) and Troyer Citrange (Citrus sinensis x Poncirus trifoliata or Citrus sinensis x Citrus trifoliata) and Citrange (Citrus sinensis x Poncirus trifoliata or C. sinensis x C. trifoliata). Citrus varieties can also be recombinant, engineered to additionally express higher levels of defensins, antimicrobial peptides, or recombinant virus particle.

### EXAMPLES

[0746] The following non-limiting examples are provided to further illustrate the present invention.

### Examples 1-5: Use of Flagellin Peptides in Combination with Other Inducers to Prevent and Treat Citrus Disease

[0747] Examples 1-5 describe the use of various compositions in the prevention and treatment of citrus disease. For ease of reference, the compositions tested, their mode of administration and application use rate are described in Table 24 below. Note that some compositions (e.g., composition 6) are described as having two parts (Part A and Part B). As will be described in the examples, these two parts were applied simultaneously or sequentially depending on the test.

TABLE 24
Compositions for the prevention and treatment of citrus disease

| | | | Application Use |
|---|---|---|---|
| | | | Rate |
| | | | Milliliters per tree |
| | | | (mL/tree) or Fluid |
| | | Treatment | ounce/acre (Fl. |
| Composition No: | Formulation | Method | oz/Ac) |
| Citrus Composition 1 | Bt.4Q7Flg22Syn01 (SEQ ID | Trunk Injection | 2.75 mL/tree |
| | NO: 571) 120 ppm | | (0.33 mg) |
| | 10 mM Sodium Phosphate | | |
| | Buffer, pH 5.7 | | |
| Citrus Composition 2 | Oxytetracycline-HCl | Trunk Injection | 20 mL/tree |
| | (48.6 mg/mL solution in | | (0.9278 g per tree) |
| | water) | | |
| Citrus Composition 3 | Oxytetracycline-HCl | Trunk Injection | 20 mL/tree |
| | (24.1 mg/mL solution in | | (0.4818 g per tree) |
| | water) | | |
| Citrus Composition 4 | Thionin-like Peptide | Trunk Injection | 80 mL/tree |
| | (SEQ ID NO: 620) | | |
| | (fermentation broth filtrate) | | |
| Citrus Composition 5 | Serine Protease 2 | Trunk Injection | 20 mL/tree |
| | Bacillus subtilis | | |
| | (SEQ ID NO: 795) | | |
| | (fermentation broth filtrate) | | |
| Citrus Composition 6 | Part A | Trunk Injection | 2.75 mL/tree |
| | Bt.4Q7Flg22Syn01 | | (0.33 mg/tree) |
| | (SEQ ID NO: 571) 120 ppm | | |
| | 10 mM Sodium Phosphate | | |
| | Buffer, pH 5.7 | | |
| | Part B | Trunk Injection | 20 mL/tree |
| | Oxytetracycline-HCl | | (0.4818 g per tree) |
| | (24.1 mg/mL solution in | | |
| | water) | | |
| Citrus Composition 7 | Part A | Foliar Spray | 3.0 mL/tree (0.36 |
| | Bt.4Q7Flg22Syn01 | | mg/tree) in a spray |
| | (SEQ ID NO: 571) 120 ppm | | carrier volume of 3 |
| | 10 mM Sodium Phosphate | | L water + 0.1% v/v |
| | Buffer, pH 5.7 | | non-ionic surfactant |
| | | | (alkyl phenol |
| | | | ethoxylate) |
| | Part B | Trunk Injection | 20 mL/tree |
| | Oxytetracycline-HCl | | (0.4818 g per tree) |
| | (24.1 mg/mL solution in | | |
| | water) | | |
| Citrus Composition 8 | Part A | Foliar Spray | 12.0 mL/tree (1.44 |
| | Bt.4Q7Flg22Syn01 | | mg/tree) in a spray |
| | (SEQ ID NO: 571) 120 ppm | | carrier volume of 3 |
| | 10 mM Sodium Phosphate | | L water + 0.1% v/v |
| | Buffer, pH 5.7 | | non-ionic surfactant |
| | | | (alkyl phenol |
| | | | ethoxylate) |
| | Part B | Trunk Injection | 20 mL/tree |
| | Oxytetracycline-HCl | | (0.4818 g per tree) |
| | (24.1 mg/mL solution in | | |
| | water) | | |
| Citrus Composition 9 | Part A | Trunk Injection | 2.75 mL/tree |
| | Bt.4Q7Flg22Syn01 | | (0.33 mg/tree) |
| | (SEQ ID NO: 571) 120 ppm | | |
| | 10 mM Sodium Phosphate | | |
| | Buffer, pH 5.7 | | |
| | Part B | Trunk Injection | 20 mL/tree |
| | L-Cysteine | | (62.86 mg per tree) |
| | (3.143 mg/mL solution in | | |
| | water) | | |
| Citrus Composition | Part A | Trunk Injection | 2.75 mL/tree |
| 10 | Bt.4Q7Flg22-Syn01 | | (0.33 mg/tree) |
| | (SEQ ID NO: 571) 120 ppm | | |
| | 10 mM Sodium Phosphate | | |
| | Buffer, pH 5.7 | | |
| | Part B | Trunk Injection | 20 mL/tree |
| | 2-Deoxy-D-Glucose (2-DDG) | | (111.1 mg per tree) |
| | (5.56 mg/mL solution in | | |
| | water) | | |
| Citrus Composition | Part A | Trunk Injection | 2.75 mL/tree |
| 11 | Bt.4Q7Flg22-Syn01 | | (0.33 mg/tree) |
| | (SEQ ID NO: 571) 120 ppm | | |
| | 10 mM Sodium Phosphate | | |
| | Buffer, pH 5.7 | | |
| | Part B | Trunk Injection | 20 mL/tree |
| | β-Aminobutyric acid (BABA) | | (2 g per tree) |
| | (100 mg/mL solution in | | |
| | water) | | |
| Citrus Composition | Part A | Trunk Injection | 2.75 mL/tree |
| 12 | Bt.4Q7Flg22Syn01 | | (0.33 mg/tree) |
| | (SEQ ID NO: 571) 120 ppm | | |
| | 10 mM Sodium Phosphate | | |
| | Buffer, pH 5.7 | | |
| | Part B | Trunk Injection | 20 mL/tree |
| | ACTIGARD WG | | (1 g per tree) |
| | (Active Ingredient: 50% | | |
| | Acibenzolar-S-methyl: | | |
| | Benzo (1,2,3) thiadiazole- | | |
| | 7-carbothioic acid-S-methyl | | |
| | ester; BTH) | | |
| | (50 mg/mL solution in water) | | |
| Citrus Composition | Part A | Trunk Injection | 2.75 mL/tree |
| 13 | Bt.4Q7Flg22Syn01 (SEQ ID | | (0.33 mg/tree) |
| | NO: 571) 120 ppm | | |
| | 10 mM Sodium Phosphate | | |
| | Buffer, pH 5.7 | | |
| | Part B | Trunk Injection | 20 mL/tree |
| | Serine Protease 2 | | |
| | Bacillus subtilis | | |
| | (SEQ ID NO: 795) | | |
| | (fermentation broth filtrate) | | |
| Citrus Composition | Part A | Trunk Injection | 2.75 mL/tree |
| 14 | Bt.4Q7Flg22Syn01 (SEQ ID | | (0.33 mg/tree) |
| | NO: 571) 120 ppm | | |
| | 10 mM Sodium Phosphate | | |
| | Buffer, pH 5.7 | | |
| | Part B | Trunk Injection | 80 mL/tree |
| | Thionin-like Peptide (SEQ ID | | |
| | NO: 620) | | |
| | (fermentation broth filtrate) | | |
| Citrus Composition | Part A | Trunk Injection | 20 mL/tree |
| 15 | L-Cysteine | | (62.86 mg per tree) |
| | (3.143 mg/mL solution in | | |
| | water) | | |
| | Part B | Trunk Injection | 20 mL/tree |
| | Oxytetracycline-HCl | | (0.9278 g per tree) |
| | (48.6 mg/mL solution in | | |
| | water) | | |
| Citrus Composition | Part A | Trunk Injection | 20 mL/tree |
| 16 | 2-Deoxy-D-Glucose (2-DDG) | | (111.1 mg per tree) |
| | (5.56 mg/mL solution in | | |
| | water) | | |
| | Part B | Trunk Injection | 20 mL/tree |
| | Oxytetracycline-HCl | | (0.4818 g per tree) |
| | (24.1 mg/mL solution in | | |
| | water) | | |
| Citrus Composition | Part A | Trunk Injection | 20 mL/tree |
| 17 | β-Aminobutyric acid (BABA) | | (2 g per tree) |
| | (100 mg/mL solution in | | |
| | water) | | |
| | Part B | Trunk Injection | 20 mL/tree |
| | Oxytetracycline-HCl | | (0.4818 g per tree) |
| | (24.1 mg/mL solution in | | |
| | water) | | |
| Citrus Composition | Part A | Trunk Injection | 20 mL/tree |
| 18 | ACTIGARD WG | | (1 g per tree) |
| | (Active Ingredient: 50% | | |
| | Acibenzolar-S-methyl: | | |
| | Benzo (1,2,3) thiadiazole-7- | | |
| | carbothioic acid-S-methyl | | |
| | ester; BTH) | | |
| | (50 mg/mL solution in water) | | |
| | Part B | Trunk Injection | 20 mL/tree |
| | Oxytetracycline-HCl | | (0.9278 g per tree) |
| | (48.6 mg/mL solution in | | |
| | water) | | |
| Citrus Composition | Part A | Trunk Injection | 20 mL/tree |
| 19 | Serine Protease 2 | | |
| | Bacillus subtilis | | |
| | (SEQ ID NO: 795) | | |
| | (fermentation broth filtrate) | | |
| | Part B | Trunk Injection | 20 mL/tree |
| | Oxytetracycline-HCl | | (0.4818 g per tree) |
| | (24.1 mg/mL solution in | | |
| | water) | | |
| Citrus Composition | Part A | Trunk Injection | 80 mL/tree |
| 20 | Thionin-like Peptide (SEQ ID | | |
| | NO: 620) | | |
| | (fermentation broth filtrate) | | |
| | Part B | Trunk Injection | 20 mL/tree |
| | Oxytetracycline-HCl | | (0.9278 g per tree) |
| | (48.6 mg/mL solution in | | |
| | water) | | |
| Citrus Composition | Bt.4Q7Flg22-Syn01 (SEQ ID | Foliar Spray | 3.0 mL/tree (0.36 |
| 21 | NO: 571) 120 ppm | | mg) in a spray |
| | 10 mM Sodium Phosphate | | carrier volume of 3 |
| | Buffer, pH 5.7 | | L water + 0.1% v/v |
| | | | non-ionic surfactant |
| | | | (akyl phenol |
| | | | ethoxylate) |
| Citrus Composition | Part A | Foliar Spray | 12.0 mL/tree (1.44 |
| 22 | Bt.4Q7Flg22Syn01 (SEQ ID | | mg) in a spray |
| | NO: 571) 120 ppm | | carrier volume of 3 |
| | 10 mM Sodium Phosphate | | L water + 0.1% v/v |
| | Buffer, pH 5.7 | | non-ionic surfactant |
| | | | (akyl phenol |
| | | | ethoxylate) |
| Citrus Composition | Bt.4Q7Flg22 (SEQ ID NO: | Trunk Injection | 2.75 mL/tree |
| 23 | 226) 120 ppm | | (0.33 mg) |
| | 10 mM Sodium Phosphate | | |
| | Buffer, pH 5.7 | | |

### Example 1: Treatment of Citrus Trees Infected with Candidatus Liberibacter Asiaticus (CLas) with Flg22 Peptide Combinations—Increased Fruit Yield —Hamlin Orange: Melvin Grove, Florida

[0748] Trees were treated at three separate sites in Florida sites that were selected due to a high prevalence of Citrus Greening Disease (Huanglongbing) caused by the bacterial pathogen Candidatus Liberibacter asiaticus (CLas). Five-year old Hamlin orange trees (Citrus sinensis) were treated at a commercial grove orchard located in central Florida (Okeechobee County), 6-year old Vernia orange trees on Swingle rootstock were treated at Lake Wales, Fla. (Polk County), and 9-year old Valencia orange trees were treated at Eustis, Fla. (Lake County). Citrus composition treatments were applied as listed in Table 24 above using a low-pressure injection device, BRANDT ENTREE (BRANDT) for trunk injection or a CO₂-pressurized backpack sprayer that produced a fine mist for foliar spray. Foliar compositions of Bt.4Q7Flg22 were diluted in water with a non-ionic surfactant (alkyl phenol ethoxylate; 0.1% v/v of spray tank volume) and evenly applied to the canopy of the tree at a spray rate of 3 Liters (L) per tree. Blocks of trees receiving a foliar treatment were spaced in the trial area with a gap (skipped tree) in between treatment blocks to avoid drift of treatment into neighboring treatment blocks. Treatments were applied during the early morning or late evening during a period of low wind (<5 mph), and conditions were such all spray treatments dried on leaves within a period of 4 hours. Combination treatments described in Table 25 were either co-injected in the same BRANDT ENTREE bottle (Citrus Composition 6 and 9-20) or applied separately as an oxytetracycline injection followed by a Bt.4Q7Flg22Syn01 foliar treatment on the same day (Citrus Composition 7 and 8). For all treatments, 10 trees were used per treatment, separated into two replicated blocks of five trees each. Citrus compositions 1-6 and 9-22 were applied at the Okeechobee, Polk, Fla. and Lake County, FL groves, while Citrus Compositions 7 and 8 were applied at the Okeechobee, Fla. grove alone.

[0749] To assess the effects of Citrus Compositions 1-23 on fruit yield and quality, Hamlin oranges (Okeechobee County, FL) were harvested 8.5 months post-treatment, and the Vernia (Polk County, FL) and Valencia (Lake County, FL) oranges will be harvested approximately 10-11 months post-treatment. All fruit with a diameter greater than or equal to 1.6 inches (40 mm) were hand-picked and collected for each tree. The total “Fruit Count” and “Fruit Weight” (in kilograms) per individual tree was measured and recorded. Trees with total fruit weights greater than 200%, or less than 50%, of the median fruit weight for the trial (all treatments included) were considered to be outliers and removed from the dataset. Fruit size was assessed as the 1) “Average Weight per Fruit” in grams (total fruit weight divided by total fruit count per tree=average weight per fruit) and 2) “Average Fruit Diameter” in millimeters. For diameter measurements, digital calipers accurate to 0.1 mm were used to measure 10 random fruit from each tree, for a total of 100 fruit per treatment (10 trees with 10 fruit each). The calipers were positioned perpendicular to the fruit blossom and stem ends, and diameter was measured at the widest point on the fruit. One of the symptoms of citrus greening is increased fruit drop prior to harvest; therefore, the number of recently dropped, non-rotting fruit was counted for each tree. Percent (%) fruit drop was calculated as the number of pre-harvest dropped fruit divided by the total fruit (dropped and picked) for each tree. Average yield, average fruit diameter and % fruit drop for each of the tested compositions are described in Table 25 below.

[0750] Harvest results from ‘Valencia’ orange trees (Table 25) indicated that trunk injections of flagellin polypeptide compositions including Bt.4Q7Flg22 (SEQ ID NO: 226) or Bt.4Q7Flg22Syn01 (SEQ ID NO: 571) were effective for increasing the number of fruit harvested per tree and the average fruit size (weight and diameter), resulting in 33% and 26% total increased yield (kg) per tree, respectively.

TABLE 25
Trunk injection of Bt.4Q7Flg22Syn01 (SEQ ID NO: 571)
and Bt.4Q7Flg22 (SEQ ID NO: 226) increase
‘Vernia’ yield relative to an untreated control

| | Average | Average | | | |
|---|---|---|---|---|---|
| | Yield | Yield | Calculated | | |
| | (kg | (Fruit | Average | Average | % |
| | fruit per | Count per | Fruit | Diameter | Fruit |
| Treatment* | tree) | Tree) | Weight | (mm) | Drop |
| Untreated | 53.5 | 345.0 | 155.2 | 66.7 | 3.0 |
| Citrus | 67.3 | 408.1 | 164.9 | 69.6 | 2.2 |
| Composition 1 | (126%) | (118%) | (106%) | (104% | (73%) |
| Composition 23 | 71.0 | 445.1 | 159.6 | 69.4 | 1.3 |
| | (133%) | (129%) | (103%) | (104%) | (43%) |

*Citrus compositions, administration route, and dosage are descnbed in Table 24.

[0751] Next, combination treatments of trunk-injected immune activators (BABA, BTH), callose synthase inhibitor 2-DDG, proteinogenic amino acid L-cysteine, and fermentation filtrates containing the antimicrobial compounds Serine Protease 2 (SP2) (SEQ ID NO:795) and thionin (SEQ ID NO: 620) were co-injected with Bt.4Q7Flg22Syn01 (SEQ ID NO: 571) to assess whether combination treatments would further increase yield. Average yield, average fruit diameter and % fruit drop for each of the tested compositions are described in Table 26 below.

TABLE 26
Trunk injection of Flg22-Syn01 combination treatments
increased ‘Hamlin’ fruit yield relative to Flg22-Syn01 alone

| | Average Yield | Average | Fruit Drop |
|---|---|---|---|
| | (Fruit Count per | Fruit | (%) |
| | Tree) (Relative to | Diameter | (Relative to |
| Treatment* | Composition 1) | (mm) | Composition 1) |
| Citrus Composition 1 | 63.8 fruit/tree | 60.9 mm | 10.5% |
| Citrus Composition 9 | 70.8 fruit/tree | 66.6 mm | 7.21% |
| | (111%) | (109%) | (−3.3%) |
| Citrus Composition 10 | 78.6 fruit/tree | 63.2 mm | 10.8% |
| | (123%) | (104%) | (+0.3%) |
| Citrus Composition 11 | 98.3 fruit/tree | 64.8 mm | 4.5% |
| | (154%) | (107%) | (−6.0%) |
| Citrus Composition 12 | 107.8 fruit/tree | 66.6 mm | 6.3% |
| | (169%) | (109%) | (−4.2%) |
| Citrus Composition 13 | 72.5 fruit/tree | 69.1 mm | 1.4% |
| | (114%) | (113%) | (−9.1%) |
| Citrus Composition 14 | 98.9 fruit/tree | 63.3 mm | 5.7% |
| | (155%) | (104%) | (−4.8%) |

*Citrus compositions, administration route, and doses are described in Table 24

[0752] Yield results indicate that Bt.4Q7Flg22Syn01 (SEQ ID NO: 571) is compatible with all tested co-injection treatments, and that the combination treatments increase the number of harvested fruit per tree relative to Bt.4Q7Flg22Syn01 injection alone, as well as increase average fruit size (diameter, mm) and either reduce or remain unchanged pre-harvest fruit drop relative to Bt.4Q7Flg22Syn01 injection alone. In a separate trial, compatibility (additive or synergistic) was tested using a combination treatment for Bt.4Q7Flg22Syn01 (trunk injection and/or foliar spray) treatment with a trunk injection of the antibiotic oxytetracycline. A low dose of oxytetracycline (0.45 g/tree) was delivered at the same time as Bt.4Q7Flg22Syn01 treatment.

TABLE 27
Bt.4Q7Flg22Syn01 (SEQ ID NO: 571) trunk injection or foliar
spray increased ‘Hamlin’ fruit yield in trees co-injected with
oxytetracycline relative to oxytetracycline alone

| | Average | Calculated | |
|---|---|---|---|
| | Yield | Average | Fruit Drop |
| | (kg fruit | Fruit | (%); |
| | per tree) | Weight (g) | (Relative |
| | (Relative | (Relative | to Citrus |
| | to Citrus | to Citrus | Composition |
| Treatment | Composition 3) | Composition 3) | 3) |
| Citrus Composition 3 | 12.65 kg/tree | 148.9 g | 6.1% |
| Citrus Composition 6 | 13.25 kg/tree | 152.5 | 5.8% |
| | (105%) | (102%) | (−0.3%) |
| Citrus Composition 7 | 16.01 kg/tree | 145.2 | 6.3% |
| | (127%) | (98%) | (+0.2%) |
| Citrus Composition 8 | 14.03 kg/tree | 145.3 | 3.5% |
| | (111%) | (98%) | (−2.6%) |
| AVERAGE for | +14.1% | −0.8% | −0.9% |
| Compositions 6, 7 and 8 | | | |
| relative to Composition 3 | | | |

*Citrus compositions, administration route, and doses are described in Table 24

[0753] Results in Table 27 above indicated that co-treatment of ‘Hamlin’ orange trees with Bt.4Q7Flg22Syn01 (SEQ ID NO: 571) and oxytetracyline injection increases yield (kg per tree), while fruit size and fruit drop remain relatively unchanged. A citrus management program that included co-injection of Flg22 with oxytetracyline would be expected to provide on average 14.1% increase in yield relative to injection of oxytetracycline alone (Table 27).

[0754] Co-injection treatments of oxytetracycline (0.45 g or 0.90 g) with either BABA, BTH, 2-DDG, L-cysteine, BTH (ACTIGARD WG), or fermentation filtrates containing serine protease 2 or thionin were next tested for ability to increase ‘Hamlin’ yield and/or decrease fruit drop. The results are summarized in Tables 28 (yield) and 29 (fruit drop) below.

TABLE 28
Trunk injection of oxytetracycline combination treatments increased
‘Hamlin’ fruit yield relative to oxytetracycline alone

| | Average Yield | Change in Yield |
|---|---|---|
| | (kg fruit per | relative to Citrus |
| Treatment | tree) | Composition 2 or 3 (%) |
| Citrus Composition 2 | 11.98 kg/tree | — |
| Citrus Composition 3 | 12.65 kg/tree | — |
| Citrus Composition 17 | 15.90 kg/tree | +25.7% relative to |
| | | Composition 3 |
| Citrus Composition 15 | 16.5 kg/tree | +37.7% relative to |
| | | Composition 2 |
| Citrus Composition 18 | 15.18 kg/tree | +26.7% relative to |
| | | Composition 2 |

*Citrus Compositions, application route, and doses are described in Table 24.

TABLE 29
Trunk injection of oxytetracycline combination treatments
decreased fruit drop relative to oxytetracycline alone

| | | Change in Fruit Drop |
|---|---|---|
| | Average Fruit Drop | relative to Citrus |
| Treatment | (percent of total fruit) | Composition 2 or 3 (%) |
| Citrus Composition 2 | 4.7% | — |
| Citrus Composition 3 | 6.1% | — |
| Citrus Composition 16 | 3.3% | 2.8% Decrease relative |
| | | to Composition 3 |
| Citrus Composition 19 | 4.3% | 1.8% Decrease relative |
| | | to Composition 3 |
| Citrus Composition 20 | 3.5% | 1.2% Decrease relative |
| | | to Composition 2 |

*Citrus Compositions, application route, and doses are described in Table 24.

[0755] In comparison to trees injected with oxytetracycline alone, increased yield and decreased fruit drop was observed for co-injection of oxytetracycline and an inducer compound or bioactive polypeptide. Increased total kg/tree was observed when oxytetracycline was combined with immune activators BABA or BTH (ACTIGARD WG) or L-cysteine; reduced fruit drop was observed when oxytetracycline was combined with Thionin (SEQ ID NO: 620), Serine Protease 2 (SEQ ID NO: 795), or the callose synthase inhibitor 2-DDG. These treatments could be further combined with a bioactive polypeptide such as Flg22.

### Example 2: Treatment of Citrus Trees Infected with Candidatus Liberibacter Asiaticus with Flg22 Combinations Increases Fruit Quality

[0756] As described in Example 1, oranges of the ‘Hamlin’, ‘Vernia’, and “Valencia’ varieties were harvested from trials designed to test the efficacy of Bt.4Q7Flg22Syn01 peptide and oxytetracycline combination treatments for increased yield and fruit quality. Trials were arranged with 10 trees per treatment, with two replicated blocks of five trees each. At the time of harvest, two representative fruit were collected per tree.

[0757] For juice quality analysis, one set of oranges consisted of 10 total fruit, each corresponding to a sampling from 5 trees of the same experimental treatment. The set of 10 oranges were weighed (gram; g) and then juiced together. Oranges were imaged as a set of whole fruit and then cut in half so the pedicel and the style were a part of separate halves and the interior half of the fruit resembled wedges in a wheel. After imaging the halved fruit, each half was juiced until no endocarp remained. The juice from all the fruit in the set was strained to remove bulk pulp and then combined and measured for juice volume (mL) and mass (g). Mean juice volume per fruit (mL), mean fruit weight (g), and % juice content (g juice in set/g comprising the whole fruit in set) were calculated and recorded. The bulk juice was strained through a mesh strainer and samples were retained for Brix and acidity analysis (1 mL and 5 mL, respectively).

[0758] Acid-corrected ^{o}Brix (^{o}Brix_{c}) values of juice were obtained from the juiced (squeezed) fruit following the USDA minimum standards for Brix laboratory analytical methods. A MA871 Refractometer (Milwaukee Instruments) was used for Brix analysis. For Brix analysis, 1 mL of the strained juice from each set was centrifuged at 13,300×g for 30 seconds to pellet pulp. 100 μL of distilled water was used to zero the instrument, and 100 μL each of 12.5% Brix and 25% Brix standards made with sucrose (Acros Organics, Belgium) were used to verify calibration between runs. A 100 μL volume of each sample was read for Brix content and recorded. Temperature was recorded using the output in the Brix analysis meter. (JBT FoodTech Laboratory Manual, “Procedures for Analysis of Citrus Products, Sixth Edition). For determination of citric acid content (% CA), 5 mL of strained juice was diluted 10-fold in distilled water. The diluted sample was titrated to pH 8.10 using a HI 84532 Titratable Acidity Minititrator & pH Meter for Fruit Juice (Hanna Instruments). The low range of citric acid was recorded from the displayed “% CA” value. The standard pH curve was set with provided standards at pH 4.01, pH 7.01, and pH 8.20. Temperature was recorded using the displayed temperature output from the temperature probe. After collecting Brix values and acidity data, the fruit brix to acidity ratio was calculated (Brix:CA). Increased Brix and Brix:CA values are indicative of a higher quality fruit with increased sugar content relative to acid content. Results are described in Table 30 below.

TABLE 30
Trunk injection of Bt.4Q7Flg22Syn01 (SEQ ID NO: 571) combination
treatments with inducer compounds increased ‘Hamlin’ fruit yield quality

| Treatment | Juice Content (%) | Brix value |
|---|---|---|
| Untreated | 43% | 9.2 |
| Citrus Composition 1 | 46% | 9.4 |
| Citrus Composition 9 | 42% | 9.8 |
| Citrus Composition 10 | 45% | 9.3 |
| Citrus Composition 11 | 47% | 9.6 |
| Citrus Composition 12 | 36% | 9.7 |
| Citrus Composition 13 | 47% | 9.3 |
| Citrus Composition 14 | 52% | 9.9 |

*Citrus Compositions, application route, and doses are described in Table 24.

[0759] In addition to increasing yield (see Example 1), combination treatments with Bt.4Q7Flg22Syn01-injected trees improve juice content. In comparison to the untreated control fruit with a measured juice content of 43%, Bt.4Q7Flg22Syn01-treated trees produced fruit with 46% juice content. Co-injection of 2-DDG, BABA, SP2, and thionin (Composition 14) with Bt.4Q7Flg22Syn01 increased juice content by 2-9%. Brix values are also improved in comparison to the untreated control (Brix=9.2) or compared to Bt.4Q7Flg22Syn01 alone (9.4) and for all combinations tested. The greatest increase in Brix was observed for Bt.4Q7Flg22Syn01 in combination with thionin (SEQ ID NO: 620), with a Brix value of 9.9.

### Example 3: Treatment of Citrus Trees Infected with Candidatus Liberibacter Asiaticus with Recovery-Promoting Enzyme Compositions to Restore Plant Health and Increase Fruit Yield

[0760] Described herein is a method for promoting tree recovery from the symptoms of Citrus Greening Disease or HLB using a multi-pronged approach to 1) alert the plant to the presence of pathogenic bacteria using trunk injection or foliar application of a Flg22 peptide from Bacillus thuringiensis, 2) clear excess callose and starch polymers from the plant vasculature through injection of callose- and starch-degrading enzymes, and/or the callose synthesis inhibitor 2-DDG, and 3) improve plant health through delivery of the sulfur-containing amino acid L-cysteine.

[0761] Trees were injected at three separate citrus grove sites that had a high prevalence of HLB disease. Treatment trees included 10-year old ‘Ruby Red’ grapefruit (Citrus x paradisi) located at a commercial grove orchard located in central Florida (Okeechobee County) and 8 to 10 year old ‘Valencia’ orange (Citrus sinesis) trees located at two sites, a grove in Eustis, Fla. (Lake County) and a grove in central Florida (Okeechobee County). Individual and combinations of citrus treatments in Table 31 below were injected using a low-pressure injection device, BRANDT ENTREE (BRANDT) into the trunk of the citrus trees using the methods as previously described in Example 1. For all treatments, 10 trees were used per treatment, separated into two replicated blocks of five trees each. To assess the effects of citrus recovery treatments on fruit yield and quality, ‘Ruby Red’ grapefruit were harvested 20 months post-treatment, and the ‘Valencia’ oranges (Okeechobee and Lake Counties) were harvested approximately 22 months post-treatment. Fruit were harvested and assessed according the same metrics of total “Fruit Count” and “Fruit Weight”, “Average Weight per Fruit”, “Average Fruit Diameter” and “% Drop” as described in Example 1, “Acid-corrected ^{o}Brix (^{o}Brix_{c})”, “Citric Acid %”, “% Juice Content” as described as in Example 2, with the exception that one set of grapefruit consisted of 25 total fruit, sampled as 5 fruit each from 5 trees. One set of 25 grapefruit were assessed per replicated treatment block, for a total of two sets per treatment.

TABLE 31
Enzyme and peptide sequences for citrus trunk injection treatments

| | | | Amount of |
|---|---|---|---|
| | Active Ingredient | | Active |
| Treatment | (Sequence or | Treatment | Ingredient |
| No: | CAS Number) | Method | per tree |
| Citrus | β-1,3-endoglucanase | Trunk Injection | 660-2640 |
| Recovery | from Hordium vulgare | | Units enzyme |
| Treatment 1 | (SEQ ID NO: 731) | | per tree |
| Citrus | β-1,3-endoglucanase | Trunk Injection | 660-2640 |
| Recovery | from Paenibacillus | | Units enzyme |
| Treatment 2 | (SEQ ID NO: 732) | | per tree |
| Citrus | Amylase (amyE) | Trunk Injection | 660 Units |
| Recovery | from Bacillus | | enzyme per |
| Treatment 4 | licheniformis | | tree |
| | (SEQ ID NO: 735) | | |
| Citrus | Bt.4Q7Flg22 | Trunk Injection | 0.33-3.3 mg |
| Recovery | from Bacillus | or Foliar | per tree |
| Treatment 5 | thuringiensis | Spray | |
| | strain 4Q7 | | |
| | SEQ ID NO: 226 | | |
| Citrus | L-cysteine | Trunk Injection | 0.266 mg per |
| Recovery | (CAS 52-90-4) | | tree |
| Treatment 6 | | | |
| Citrus | 2-Deoxy-D-Glucose | Trunk Injection | 111.1 mg per |
| Recovery | (2-DDG; | | tree |
| Treatment 7 | CAS 154-17-6) | | |

TABLE 32
Trunk injection of recovery compositions increased ‘Grapefruit’
fruit yield relative untreated trees

| | Average Yield |
|---|---|
| | (kg per tree) |
| | (Relative |
| Treatment | to Untreated) |
| Untreated | 34.6 |
| | — |
| Bt.4Q7Flg22 | 37.2 |
| (SEQ ID NO: 226) | (108%) |
| 0.33 mg/tree) | |
| β-1,3-Endoglucanase from Barley (SEQ ID NO: 731) | 38.7 |
| (2600 U/tree) | (112%) |
| Recovery Enzyme Mixture | 35.1 |
| β-1,3-Endoglucanase from Barley (SEQ ID NO: 731) | (102%) |
| (660 U/tree) + Amylase from Bacillus licheniformis (SEQ | |
| ID NO: 735) (660 U/tree) + Cysteine (0.27 mg/tree) | |

[0762] Harvest results from replicated ‘Ruby Red’ grapefruit trials (Table 32) indicated that individual trunk injection treatments to activate the plant immune system, degrade polysaccharides in and around sieve tube elements, and provide essential amino acids for sustained defense responses (L-cysteine) lead to increased fruit yield. Bt.4Q7Flg22 injection at 0.33 mg per tree increased yield 2.6 kg per tree compared to the untreated control, while the callose-degrading enzyme β,1-3-endoglucanase from Barley increased yield 4.1 kg per tree. A Recovery Enzyme Mixture including β,1-3-endoglucanase, starch-degrading Amylase, and L-Cysteine increased yield 0.5 kg per tree which was equivalent to a 2% increase compared to the untreated control.

TABLE 33
Trunk injection of recovery compositions increased ‘Grapefruit’ juice
quantity relative to untreated trees

| | | Average | | |
|---|---|---|---|---|
| | Average | Juice | | |
| | Fruit | Volume | | |
| | Diameter | per fruit | | |
| | (mm) | (mL) | Average | |
| | (Relative | (Relative | Juice | |
| | to | to | Content | Brix:CA |
| Treatment | Untreated) | Untreated | (%) | Ratio |
| Untreated | 82.17 | 134.9 | 59% | 8.90 |
| | — | — | | |
| Bt.4Q7Flg22 | 85.03 | 163.6 | 68% | 9.24 |
| (SEQ ID NO: 226) | (103%) | (121%) | | |
| 0.33 mg/tree) | | | | |
| Recovery Enzyme Mixture | 87.68 | 156.7 | 59% | 8.51 |
| B-1,3-Endoglucanase | (107%) | (116%) | | |
| Hordeum vulgare (SEQ ID | | | | |
| NO: 731) | | | | |
| (660 U/tree) + Amylase from | | | | |
| Bacillus licheniformis (SEQ | | | | |
| ID NO: 735) (660 U/tree) + | | | | |
| Cysteine (0.27 mg/tree) | | | | |

[0763] Fruit quality assessments of the ‘Ruby Red’ grapefruit harvested in December 2018 indicate that Bt.4Q7Flg22 (0.33 mg per tree) increased fruit size, juice volume, % juice content and ^{o}Brix_{c} to Citric Acid ratio (Brix:CA) relative to the untreated control. The Recovery Enzyme Mixture injection increased overall fruit size and juice volume relative to the untreated control (Table 33).

### Example 4: Reactive Oxygen Species (ROS) Production of a Flg22 Peptide with Inducer Compounds for Use in the Treatment of Citrus Disease

[0764] Combinations of Flg22 with inducer compounds that were used to restore plant health and increase fruit yield in HLB-infected citrus trees by the restriction of CLas bacterial growth and the reduction of phloem-blocking callose polysaccharides were further examined for the activation of the plant immune system using in reactive oxygen species (ROS) assays. To test for compatibility between Flg22 peptide combinations with inducer compounds, tank mixes between native Bt.4Q7Flg22 (SEQ ID NO: 226) and L-Cysteine or 2-Deoxy-D-Glucose (2-DDG) were tested for the ability to enhance Flg22-induced ROS production. Flg22 combinations with inducer compounds in the ROS activity assays were selected to model co-injection of the citrus trees used for Hamlin oranges (Examples 1 to 2). Combination concentrations of Bt.4Q7Flg22 with inducer compounds, L-Cysteine or 2-Deoxy-D-Glucose (2-DDG) were matched to injection volumes as used for the injection of Hamlin oranges in Table 30, such that the injection rates per tree were calculated using the assumption that the phloem content is 1 L in volume. Final concentrations for Bt.4Q7Flg22 (SEQ ID NO: 226) (0.12 ppm); L-cysteine (0.06 g/L) and 2-DDG (0.1 g/L) were used in the ROS activity assays. Fresh plant tissues from soybean (variety MorSoyXtra 38X52) leaves were cut into uniform samples and floated on 150 μL of sterile water in a 96-well white, low luminescence plate. For soybean samples, fully expanded trifoliate leaves were removed from V1-V3 stage plants. Leaf discs (12.6 mm²) were cut from the leaf blades using a 4-mm diameter clean, sharpened cork borer. Discs were cut in half using a clean razor blade, and each disc half was placed in an individual well of the 96-well plate. The plate was placed under growth lights that had a 16-hour light/8-hour dark cycles at a consistent temperature of 22° C. After 18-24 hours, the water was removed from each well of the 96 well plate. Plant tissue samples were treated with a 100 μL elicitation solution containing 34 μg/mL luminol, 20 μg/mL horseradish peroxidase, and the indicated concentration of Bt.4Q7 Flg22 (SEQ ID NO: 226) alone or in combination with L-Cysteine or 2-DDG. Recognition of the Flg22 polypeptide by the plant tissue resulted in activation of immune signaling and the production of apoplastic reactive oxygen species (ROS). In the presence of ROS (H₂O₂), horseradish peroxidase catalyzed the oxidation of luminol and production of visible light. Relative light units (RLUs) were recorded with a SpectraMaxL luminometer using a 0.5 s integration and 2.0 min intervals over a time course of 40 minutes. For data analysis, the average RLU value 14.5 min post-treatment is reported (n=4 samples per treatment).

TABLE 34
ROS activity assays of Bt.4Q7Flg22 peptide used in combination with
inducer compounds

| | Relative Light Units | Fold Change |
|---|---|---|
| Treatment | 14.5 min post- | relative to |
| (n = 4 leaf samples per treatment) | treatment | Treatment A |
| Untreated | 516 | 0.028 X |
| Treatment A | 18456 | 1 X |
| BL4Q7Flg22 | | |
| (SEQ ID NO: 226); 0.12 ppm | | |
| Phosphate Buffer 10 μM | | |
| Treatment B | 17183 | 0.93 X |
| Bt. 4Q7Flg22 | | |
| (SEQ ID NO: 226); 0.12 ppm | | |
| Phosphate Buffer 10 μM + | | |
| 2-deoxy-D-glucose CAS | | |
| 154-17-6 0.1 g/L | | |
| Treatment C | 39018 | 2.11 X |
| Bt. 4Q7Flg22 | | |
| (SEQ ID NO: 226); 0.12 ppm | | |
| Phosphate Buffer 10 μM + | | |
| L-Cysteine CAS 136743-62-9 | | |
| 0.06 g/L | | |

[0765] ROS activity assay results (Table 34) indicated that inducer compound, 2-DDG, which is used as a callose synthase inhibitor, provided in combination with the Bt.4Q7Flg22 peptide (Treatment B) resulted in a ROS response that was similar to the response output from the Bt.4Q7Flg22 peptide alone (Treatment A). This was an expected result as 2-DDG used to reduce callose content in the phloem did not contribute directly to increasing the ROS response but also did not hinder the response of the Bt.4Q7Flg22 peptide and therefore found compatible. However, inducer compound, L-Cysteine provided in combination with the Bt.4Q7Flg22 peptide (Treatment C) induced and contributed to the production of ROS in soybean leaf tissue and resulted in a more than 2-fold increase (2.11×) in the production of ROS. The increase in ROS activity for the combination of L-cysteine and Bt.4Q7Flg22 provides an indicator of activation of the plant immune system.

### Example 5: Reactive Oxygen Species (ROS) Production of a Flg22 Peptide with Osmoprotectants for Use in the Treatment of Citrus Disease or Improving Yield in Row Crops

[0766] In a separate study, the compatibility between Bt.4Q7Flg22 (SEQ ID NO: 226; Composition 1) and formulations that provide increased plant osmoprotection were tested for production of reactive oxygen species (ROS) and are further described in Table 35 below. Product concentrations in the ROS assay were selected to model co-treatment of Bt.4Q7Flg22 (Composition 1) and osmoprotectant compositions in a carrier volume of 10 gallons per acre for foliar application to crops. ROS production was measured in soybean (variety MorSoyXtra 38X52) using the same methods as previously described in Example 4. Plant tissue samples were treated with a 100 μL elicitation solution containing 34 μg/mL luminol, 20 μg/mL horseradish peroxidase, and the indicated concentration of Bt.4Q7Flg22 alone (Treatment A) or in combination with osmoprotectant (Treatments B, C & D) containing betaine and/or L-proline. Relative light units (RLUs) were recorded with a SpectraMaxL luminometer using a 0.5 s integration and 2.0 min intervals over a time course of 40 minutes. For data analysis, the average total RLU over a 40 minute time course is reported (n=4 samples per treatment) in Table 35.

TABLE 35
ROS activity assays with Bt. 4Q7Flg22 and Osmoprotectants

| | Average Total | Fold Change |
|---|---|---|
| | Relative | relative to |
| Treatment | Light Units | Treatment A |
| Untreated Control | 40372 | 0.01 |
| Treatment A | 275142 | 1 |
| BL4Q7Flg22 (SEQ ID NO: 226) | | |
| 0.12 ppm (Composition 1) | | |
| Phosphate Buffer 0.01 mM | | |
| PROXEL BC preservative: 1 μM | | |
| (BIT) | | |
| Treatment B | 308932 | 1.12 X |
| BL4Q7Flg22 (SEQ ID NO: 226) | | |
| 0.12 ppm | | |
| Phosphate Buffer 0.01 mM | | |
| PROXEL BC preservative: 1 μM | | |
| (BIT) + | | |
| Osmoprotectant 0.25% | | |
| [83.49 mM Betaine-HCl | | |
| 3.3% Tribasic Potassium Phosphate | | |
| 37.9% Non-ionic surfactant(alkyl | | |
| phenol ethoxylate); PROXEL BD20 | | |
| preservative: 6.4 mM (BIT)] | | |
| Treatment C | 323822 | 1.18 X |
| BL4Q7Flg22 (SEQ ID NO: 226) | | |
| 0.12 ppm | | |
| Phosphate Buffer 0.01 mM | | |
| PROXEL BC preservative: 1 μM | | |
| (BIT) + | | |
| Osmoprotectant 0.25% | | |
| [163.88 mM L-Proline | | |
| 3.3% Tribasic Potassium Phosphate | | |
| 37.9% Non-ionic surfactant(alkyl | | |
| phenol ethoxylate); PROXEL BD20 | | |
| preservative:6.4 mM (BIT)] | | |
| Treatment D | 287127 | 1.04 X |
| Bt. 4Q7Flg22 (SEQ ID NO: 226) | | |
| 0.12 ppm | | |
| Phosphate Buffer 0.01 mM | | |
| Proxel ™ BC preservative: 1 μM | | |
| (BIT + | | |
| Osmoprotectant 0.25% | | |
| [83.49 mM Betaine-HCl | | |
| 163.88 mM L-Proline | | |
| 3.3% Tribasic Potassium Phosphate | | |
| 37.9% Non-ionic surfactant(alkyl | | |
| phenol ethoxylate); PROXEL BD20 | | |
| preservative:6.4 mM (BIT)] | | |

[0767] ROS activity assay results indicated that formulated combinations with osmoprotectants (Treatments B, C and D) are compatible with the Bt.4Q7Flg22-induced production of ROS in soybean leaf tissues, which is an indicator of activation of the plant immune system. Co-treatment of soybean leaf tissue with Bt.4Q7Flg22 with the osmoprotectants as described in treatments B, C and increased the production of ROS 1.04- to 1.18-fold over the Bt.4Q7Flg22 (Treatment A) alone.

### Examples 6-9: Foliar Compositions of Flg22 Peptides Used in Combinations with Osmoprotectant and ACC Deaminase to Increase Yield in Row Crops, Corn and Soybean

[0768] In the following examples, a series of treatment compositions comprising a combination of a Flg22 peptide, osmoprotectant and/or ACC deaminase were tested on row crops (corn and soybean) to measure their effect on yield. For ease of reference, the compositions used and application method/use rate are summarized in Table 36 below.

TABLE 36
Compositions of row crop treatments

| | | | Application |
|---|---|---|---|
| | | | Use Rate Fluid |
| Composition | | Treatment | ounce/acre |
| No: | Formulation | Method | (Fl. oz/Ac) |
| Row Crop | Bt.4Q7Flg22 (SEQ ID NO: | Foliar | 4.0 oz/Ac |
| Composition 1 | 226) 20 ppm | Spray | |
| | 1.67 mM Sodium Phosphate | | |
| | Buffer, pH 5.7 | | |
| | PROXELBC preservative: | | |
| | 330.7 μM (BIT); 53.5 μM | | |
| | (CMIT); 26.1 μM (MIT) | | |
| Row Crop | Osmoprotectant | Foliar | 3.2 oz/Ac |
| Composition 2 | 83.49 mM Betaine-HCl | Spray | |
| | 3.3% Tribasic Potassium | | |
| | Phosphate | | |
| | 37.9% Non-ionic surfactant | | |
| | (alkyl phenol ethoxylate) | | |
| | PROXEL BD20 preservative: | | |
| | 6.38 mM (BIT) | | |
| Row Crop | ACC Deaminase [SEQ ID | Foliar | 8.0 oz/Ac |
| Composition 3 | NO: 730] | Spray | |
| | Fermentation broth filtrate | | |
| | with immobilized enzyme | | |
| | [PROXELBC preservative: | | |
| | 330.7 μM (BIT); 53.5 μM | | |
| | (CMIT); 26.1 μM (MIT) | | |
| Row Crop | Osmoprotectant | Foliar | 3.2 oz/Ac |
| Composition 4 | 163.88 mM Proline | Spray | |
| | 3.3% Tribasic Potassium | | |
| | Phosphate | | |
| | 40 mM Phosphoric Acid | | |
| | 37.9% Non-ionic surfactant | | |
| | (alkyl phenol ethoxylate) | | |
| | PROXEL BD20 preservative: | | |
| | 6.38 mM (BIT) | | |

### Example 6: Foliar Application of Bt.4Q7Flg22 (SEQ ID NO:1) (Composition 1) in Combination with Osmoprotectant (Composition 2) to V4-V7 Corn

[0769] Foliar treatments with Bt.4Q7Flg22 (SEQ ID NO: 226) (Row Composition 1), in combination with Osmoprotectant (Row Composition 2), were conducted to determine if synergistic effects resulted from the combination of the treatments. Yield impact of foliar spray applications of Bt.4Q7Flg22 (SEQ ID NO: 226) (Row Composition 1) provided in combination treatments with an Osmoprotectant (Row Composition 2) was assessed on corn plants (hybrids: DKC 60-88 RIB and DKC 58-08 RIB) at the V4-V7 stage of development.

[0770] Replicated trials were conducted at 10 locations throughout the US Midwest (IL, IA, NE) testing on two hybrids per location. Field seed beds at each location were prepared using conventional or conservation tillage methods for corn plantings. Fertilizer was applied as recommended by conventional farming practices and remained consistent between the US Midwest locations. Herbicides were applied for weed control and supplemented with cultivation when necessary. Four-row plots, 17.5 feet (5.3 meters) long were planted at all locations. Corn seed was planted 1.5 to 2 inches (3.8 to 5.1 cm) deep, to ensure normal root development, at 28,000 to 36,000 plants per acre with row widths of 30 inch (76.2 cm)-seed spacing of approximately 1.6 to 1.8 seeds per foot. Each hybrid was grown in at least three separate plots (replicates) per treatment at each location, to account for field variability. Plots were maintained using the individual grower's production practices.

[0771] Native Bt.4Q7Flg22 bioactive priming polypeptide (SEQ ID NO: 226) (Composition 1) was chemically synthesized via solid phase peptide synthesis and formulated at 4 Fl. oz/Ac (292.1 mL/hectare, Ha) use rate. The final concentration in the spray tank was 42 ppb after dilution in carrier rate of 15 gallons water/Ac, GPA (37.85 L/Ha). Native Bt.4Q7Flg22 bioactive priming polypeptide (SEQ ID NO: 226) (Composition 1) was applied alone and in combination with Osmoprotectant (Composition 2). Osmoprotectant (Composition 2) was formulated at a 3.2 Fl. oz/Ac (233.7 mL/Hectare, Ha) use rate. The combination was applied at the V4-V7 development stage with a non-ionic surfactant at 0.067% v/v (final concentration in spray tank).

[0772] Corn yield in bushels per acre (Bu/Ac) was reported at all locations as an average yield of each treatment's replicates across each hybrid. The effect of Bt.4Q7Flg22 (SEQ ID NO: 226) (Composition 1) in combination with Osmoprotectant (Composition 2) was normalized to the average yield for the surfactant control plots for the 10 locations (Table 37). Additionally, the win rate was calculated: the percentage of testing locations at which one treatment has a yield advantage over other treatments (in this case, as compared to the surfactant-control plants).

[0773] Foliar treatment Bt.4Q7Flg22 (SEQ ID NO: 226) (Composition 1) in combination with Osmoprotectant (Composition 2) provided yield benefits over the surfactant-treated control corn plants with an average+8.70 Bu/Ac (546 kg/Ha) increase observed across the 10 locations with a 60% win rate over surfactant-control. The Bt.4Q7Flg22 combination treatment with the Osmoprotectant resulted in yield increases in corn greater than the additive increases of these treatments applied individually (Table 37).

TABLE 37
Foliar treatment of corn with Bt.4Q7Flg22 (Composition 1), in
combination with Osmoprotectant (Composition 2) to increase
yield in corn

| | Application | Average Total | Average Bu/Ac |
|---|---|---|---|
| | Use Rate | Yield Bu/Ac | Increase compared |
| Treatment—Corn | Fl. oz/Ac | (10 locations) | to Control |
| Surfactant Control | — | 223.21 | — |
| BL4Q7Flg22 | 4.0 | 224.67 | +1.42 |
| (Composition 1) | | | |
| Osmoprotectant | 3.2 | 229.53 | +6.32 |
| (Composition 2) | | | |
| BL4Q7Flg22 | 4.0 | 231.91 | +8.70 |
| (Composition 1) + | | | |
| Osmoprotectant | 3.2 | | |
| (Composition 2) | | | |

### Example 7: Foliar Application of Bt4Q7Flg22 (Composition 1) in Combination with ACC Deaminase (Composition 3) to V4-V7 Corn

[0774] Foliar treatments with Bt.4Q7Flg22 (SEQ ID NO: 226) (Composition 1), in combination with ACC Deaminase (Composition 3), were conducted to determine if synergistic effects resulted from the combination of the treatments. Yield impact of foliar spray application of Bt.4Q7Flg22 in combination with ACC Deaminase (Composition 3) was assessed on corn plants (hybrids: DKC 60-88 RIB, DKC 58-08 RIB and DKC 64-35 RIB) at the V4-V7 stage of development.

[0775] Replicated trials were conducted at 12 locations throughout the US Midwest (IL, IA, NE). Corn plants were grown as described in Example 6.

[0776] Bt.4Q7Flg22 (SEQ ID NO: 226) (Composition 1) was prepared and applied as in Example 6, alone and in combination with ACC Deaminase (Composition 3). ACC Deaminase (Composition 3) was formulated at 8 Fl. oz/Ac (584.2 mL/Hectare, Ha) use rate. The combination was applied at the V4-V7 development stage with a non-ionic surfactant at 0.1% v/v (final concentration in spray tank).

[0777] Corn yield in bushels per acre (Bu/Ac) and win rate was calculated as for Example 6.

[0778] Foliar treatment Bt.4Q7Flg22 (SEQ ID NO: 226) (Composition 1) in combination with ACC Deaminase (SEQ ID NO: 730) (Composition 3) provided yield benefits over the untreated control corn plants with an average+10.64 Bu/Ac (667.9 kg/Ha) increase observed across the 12 locations with a 75% win rate over surfactant-control. The combination treatments of Bt.4Q7Flg22 and ACC deaminase resulted in a synergistic increase in yield of greater than the individual foliar treatments with Bt.4Q7Flg22 (+4.37 Bu/Ac) and ACC deaminase (+1.06 Bu/Ac), (Table 38).

TABLE 38
Foliar treatment of corn with Bt 4Q7Flg22 (SEQ ID NO: 226)
(Composition 1), in combination with ACC Deaminase (Composition
3) to increase yield in corn

| | Application | Average Total | Average Bu/Ac |
|---|---|---|---|
| | Use Rate | Yield Bu/Ac | Increase compared |
| Treatment—Corn | Fl. oz/Ac | (12 locations) | to Control |
| Surfactant Control | — | 225.51 | — |
| BL4Q7Flg22 | 4.0 | 229.88 | +4.37 |
| (SEQ ID NO: 226) | | | |
| (Composition 1) | | | |
| ACC Deaminase | 8.0 | 226.57 | +1.06 |
| (SEQ ID NO: 730) | | | |
| (Composition 3) | | | |
| BL4Q7Flg22 | 4.0 | 236.15 | +10.64 |
| (SEQ ID NO: 226) | | | |
| (Composition 1) + | | | |
| ACC Deaminase | 8.0 | | |
| (SEQ ID NO: 730) | | | |
| (Composition 3) | | | |

### Example 8: Foliar Application of Bt.4Q7Flg22 (Composition 1) in Combination with Osmoprotectant (Composition 2) to V3-V6 Soybean

[0779] Foliar applications using native Bt.4Q7Flg22 (SEQ ID NO: 226) (Composition 1), in combination with Osmoprotectant (Composition 2), were conducted to determine if synergistic effects resulted from the combination of the treatments. Yield impact of foliar spray application was assessed on soybean plants (varieties: AG35X7, AG41X8, AG27X7 and AG30X6), at the V3-V6 stage of development.

[0780] Replicated trials were conducted at 14 locations throughout the US Midwest (IL, IA, NE) Soybean seed varieties were planted 1.5 to 2 inches (3.8 to 5.1 cm) deep to assure normal root development. Soybean seed was planted at approximately on average 150,000 plants per acre with row widths of 30 inch (76.2 cm) rows—seed spacing of approximately 7 to 8 seeds per foot (0.3 meter). Plots were maintained using the individual grower's production practices.

[0781] Bt.4Q7Flg22 (SEQ ID NO:226) (Composition 1) was applied alone and in combination with Osmoprotectant (Composition 2) as for Example 6. The combination was applied at the V3-V6 development stage with a non-ionic surfactant at 0.067% v/v (final concentration in spray tank).

[0782] Soybean yield in bushels per acre (Bu/Ac) and win rate was calculated as for Example 6.

[0783] Foliar treatment Bt.4Q7Flg22 (SEQ ID NO:226) (Composition 1) in combination with Osmoprotectant (Composition 2) provided yield benefits over the surfactant-treated control soybean plants with an average+1.94 Bu/Ac (126.4 kg/Ha) increase observed across the 14 locations with an 86% win rate over surfactant-control. The Bt.4Q7Flg22 (Composition 1) combination treatment with the Osmoprotectant (Composition 2) resulted in increased yield in soybean over the Bt.4Q7Flg22 or Osmoprotectant treatments applied alone (Table 39).

TABLE 39
Foliar treatment of soybean with Bt.4Q7Flg22 (Composition 1),
in combination with Osmoprotectant (Composition 2) to
increase yield in soybean

| | Application | Average Total | Average Bu/Ac |
|---|---|---|---|
| | Use Rate | Yield Bu/Ac | Increase compared |
| Treatment—Soybean | Fl. oz/Ac | (14 locations) | to Control |
| Surfactant Control | — | 64.69 | — |
| BL4Q7Flg22 | 4.0 | 64.97 | +0.29 |
| (SEQ ID NO: 226) | | | |
| (Composition 1) | | | |
| Osmoprotectant | 3.2 | 65.97 | +1.28 |
| (Composition 2) | | | |
| BL4Q7Flg22 | 4.0 | 64.05 | +1.94 |
| (SEQ ID NO: 226) | | | |
| (Composition 1) + | | | |
| Osmoprotectant | 3.2 | | |
| (Composition 2) | | | |

### Example 9: Foliar Application of Bt.4Q7Flg22 (Composition 1) in Combination with a Herbicide to V3-V6 Soybean

[0784] Foliar applications using native Bt.4Q7Flg22 (SEQ ID NO: 226) (Composition 1), in combination with a broad weed control herbicide with the active ingredient lactofen (24% w/v) were conducted to determine if the application of the Bt.4Q7Flg22 peptide with a herbicide used for broad weed control and protection against white mold infection could provide a beneficial yield advantage compared to that achieved from the herbicide alone. Yield impact of foliar spray application of Bt.4Q7Flg22 (SEQ ID NO:226) (Composition 1) in combination with lactofen was determined on soybean plants (varieties: AG35X7, AG41X8) at the V3-V6 stage of development. Large-scale, replicated soybean trials were conducted at 4 locations in the Midwestern US (KS, MO, IL), with planting as for Example 8.

TABLE 40
Foliar treatment of soybean with Bt. 4Q7Flg22 (Composition 1), in
combination with an herbicide to increase yield in soybean

| | Application | Average Total | Average Bu/Ac |
|---|---|---|---|
| | Use Rate | Yield Bu/Ac | Increase compared |
| Treatment—Soybean | Fl. oz/Ac | (4 locations) | to Herbicide Alone |
| Lactofen (24% w/v) | 10 | 66.10 | — |
| Herbicide | | | |
| BL4Q7Flg22 | 4 | 67.73 | +1.62 |
| (SEQ ID NO:226) + | | | |
| Lactofen (24% w/v) | 10 | | |
| Herbicide | | | |

[0785] Foliar treatment Bt.4Q7Flg22 (Composition 1) provided in combination with a broad weed control herbicide with the active ingredient lactofen increased yield+1.62 Bu/Ac (109 kg/Ha) f as compared to the herbicide treatment applied alone (Table 40), indicating that Bt.4Q7Flg22 treatment is compatible with lactofen. Provided together, Bt.4Q7Flg22 and lactofen would be expected to improve soybean resistance to white mold.

### Example 10: Additive and Synergistic Effects Between Flagellins and Recovery Enzyme Mixture

[0786] To test for additive and/or synergistic effects between combinations of Bt.4Q7Flg22 and the Recovery Enzyme Mixture (Composition Table 41), trials will be established in 5 to 10-year old Navel, Hamlin and/or Valencia orange trees and Ruby red grapefruit trees. Ten trees will be treated for each composition (described in Table 41), arranged into two replicated blocks of 5 trees each, using methods described in Example 1 for tree injection and foliar spray. Fruit will be harvested and fruit quality assessed as described in Example 1 and Example 2.

TABLE 41
Synergistic effects between combinations of Bt.4Q7Flg22 and the
recovery enzyme mixtures

| | | | Application | |
|---|---|---|---|---|
| | | | Use Rate | |
| | | | Milliliters | |
| | | | per tree | |
| | | | (mL/tree) or | |
| | | | Fluid | |
| Composition | | Treatment | ounce/acre | |
| No: | Formulation | Method | (Fl. oz/Ac) | |
| Untreated | — | — | — | |
| Citrus | Bt.4Q7Flg22 | Foliar Spray or | 0.33 | mg/tree |
| Composition 1 | (SEQ ID NO: 226) | Trunk Injection | | |
| Citrus | Bt.4Q7Flg22 | Foliar Spray or | 0.33 | mg/tree |
| Composition 2 | (SEQ ID NO: 226) | Trunk Injection | | |
| | L-Cysteine | Trunk Injection | 60 | mg/tree |
| | B-1,3-Endoglucanase | Trunk Injection | 500 | U/tree |
| Citrus | Bt.4Q7Flg22 | Foliar Spray or | 0.33 | mg/tree |
| Composition 3 | (SEQ ID NO: 226) | Trunk Injection | | |
| | L-Cysteine | Trunk Injection | 60 | mg/tree |
| | Amylase | Trunk Injection | 500 | U/tree |
| Citrus | Bt.4Q7Flg22 | Foliar Spray or | 0.33 | mg/tree |
| Composition 4 | (SEQ ID NO: 226) | Trunk Injection | | |
| | L-Cysteine | Trunk Injection | 60 | mg/tree |
| | 2-DDG | Trunk Injection | 100 | mg/tree |
| Citrus | Bt.4Q7Flg22 | Foliar Spray or | 0.33 | mg/tree |
| Composition 5 | (SEQ ID NO: 226) | Trunk Injection | | |
| | L-Cysteine | Trunk Injection | 60 | mg/tree |
| | B-1,3-Endoglucanase | Trunk Injection | 500 | U/tree |
| | Amylase | Trunk Injection | 500 | U/tree |
| | L-Cysteine | Trunk Injection | 60 | mg/tree |
| Citrus | B-1,3-Endoglucanase | Trunk Injection | 500 | U/tree |
| Composition 6 | Amylase | Trunk Injection | 500 | U/tree |
| | 2-DDG | Trunk Injection | 100 | mg/tree |
| Citrus | Bt.4Q7Flg22 | Foliar Spray or | 0.33 | mg/tree |
| Composition 7 | (SEQ ID NO: 226) | Trunk Injection | | |
| | L-Cysteine | Trunk Injection | 60 | mg/tree |
| | B-1,3-Endoglucanase | Trunk Injection | 500 | U/tree |
| | Amylase | Trunk Injection | 500 | U/tree |
| | 2-DDG | Trunk Injection | 100 | mg/tree |

### Examples 11-12

[0787] In the following Examples 11-12, a series of treatment compositions comprising a combination of a Flg22 peptide, osmoprotectant and/or ACC deaminase were tested on row crops (corn and soybean) to measure their effect on yield. For ease of reference, the compositions used are the same compositions as described in Table 42 for compositions 1, 3, 5 and 7. The compositions used, application method, and usage rates are summarized in Table 42 below.

TABLE 42
Compositions of row crop treatments for corn and soy application

| | | | Application |
|---|---|---|---|
| | | | Use Rate |
| | | | Fluid |
| Composition | | Treatment | ounce/acre |
| No: | Formulation | Method | (Fl. oz/Ac) |
| Row Crop | Bt.4Q7Flg22 (SEQ ID NO: | Foliar Spray | 4.0 oz/Ac |
| Composition 1 | 226) 20 ppm | or | Foliar or |
| | 1.67 mM Sodium Phosphate | In Furrow | 4.0 oz/Ac |
| | Buffer, pH 5.7 | Treatment | In Furrow |
| | PROXELBC preservative: | | |
| | 330.7 μM (BIT); 53.5 μM | | |
| | (CMIT); 26.1 μM (MIT) | | |
| Row Crop | ACC Deaminase [SEQ ID | In furrow | 8 oz/Ac |
| Composition 3 | NO: 730] | treatment | In Furrow |
| | Fermentation broth filtrate | | |
| | with immobilized enzyme | | |
| | PROXELBC preservative: | | |
| | 330.7 μM (BIT); 53.5 μM | | |
| | (CMIT); 26.1 μM (MIT) | | |
| Row Crop | Osmoprotectant | Foliar Spray | 3.2 oz/Ac |
| Composition 5 | 83.49 mM Betaine-HCl | | Foliar |
| | 163.88 mM L-Proline | | |
| | 3.3% Tribasic Potassium | | |
| | Phosphate | | |
| | 37.9% Non-ionic surfactant | | |
| | (alkyl phenol ethoxylate) | | |
| | PROXEL BD20 preservative: | | |
| | 6.38 mM (BIT) | | |
| Row Crop | Bt.4Q7Flg22 (SEQ ID NO: | Seed | 0.14 fl |
| Composition 6 | 226) 48 ppm | Treatment | oz/unit |
| | 4 mM Sodium Phosphate | | seed |
| | Buffer, pH 5.7 | | |
| | PROXELBC preservative: | | |
| | 330.7 μM (BIT); 53.5 μM | | |
| | (CMIT); 26.1 μM (MIT) | | |
| Row Crop | ACC Deaminase [SEQ ID | Seed | 30 mU/unit |
| Composition 7 | NO: 730] | Treatment | seed |
| | Bacterial cell lysate with free | | |
| | enzyme | | |

### Example 11: Foliar Application of Bt.4Q7Flg22 (SEQ ID NO: 226) Peptide in Combination with Osmoprotectants to Increase Soybean Yield

[0788] Foliar application of Bt.4Q7Flg22 (SEQ ID NO: 226) peptide and an osmoprotectant formulation with two active ingredient, L-Proline and Betaine, were applied to soybeans as a foliar spray to test potential for the combined treatment to increase grain yield.

[0789] Replicated trials were conducted at 11 sites throughout the US Midwest (MN, IL, IA, MO), on the following soybean varieties, AG2733, AG3931, P21a28x, and P40a47x, with one variety per site. Soybean seeds were planted and test plots established as for Example 8.

[0790] Bt.4Q7Flg22 (SEQ ID NO: 226) (Table 42; Row Crop Composition 1) was applied alone and in combination with the Osmoprotectant formulation (Table 42; Row Crop Composition 5), at soybean R2 development stage with a non-ionic surfactant at 0.067% v/v (final concentration in spray tank). Soybean yield in bushels per acre (Bu/Ac) was reported for each experimental replicate, and average change in Bu/Ac and win rate (Table 43) were calculated across all sites as described in Example 6.

TABLE 43
Foliar treatment of soybean with Bt.4Q7Flg22 (SEQ ID No: 226)
and Osmoprotectants increased yield in soybean

| | | | Average | Average |
|---|---|---|---|---|
| | | | Total | Bu/Ac |
| | | Application | Yield | Increase |
| | Treatment | Use Rate | Bu/Ac | compared |
| Treatment—Soybean | Method | Fl. oz/Ac | (11 sites) | to Control |
| Untreated Control | — | — | 65.16 | — |
| Bt.4Q7Flg22 | Foliar | 4.0 | 66.60 | +1.44 |
| (SEQ ID NO: 226) | Spray | | | |
| (Row Crop | | | | |
| Composition 1) | | | | |
| Osmoprotectant | Foliar | 3.2 | 67.82 | +2.66 |
| (Row Crop | Spray | | | |
| Composition 5) | | | | |
| Bt. 4Q7Flg22 | Foliar | 4.0 | 68.16 | +3.00 |
| (SEQ ID NO: 226) | Spray | | | |
| (Row Crop | | | | |
| Composition 1) + | | | | |
| Osmoprotectant | | 3.2 | | |
| (Row Crop | | | | |
| Composition 5) | | | | |

[0791] Foliar treatment of Bt.4Q7Flg22 (SEQ ID NO: 226) (Row Crop Composition 1) in combination with Osmoprotectant (Row Crop Composition 5) provided yield benefits over the untreated control soybean plants with an average+3.00 Bu/Ac across the 11 sites, with a 73% win-rate over untreated control. The observed yield for the combination treatment exceeded the yield for each composition alone, +1.44 Bu/Ac and +2.66 Bu/Ac for Row Crop Composition 1 and 5, respectively, demonstrating increased benefit for combinations of the bioactive peptide provided with an osmoprotectant including a betaine or proline during reproductive stages (this example) and vegetative stages (Example 8).

### Example 12: In Furrow or Seed Treatment of Corn with Bt.4Q7Flg22 (SEQ ID NO:226) in Combination with ACC Deaminase (SEQ ID NO: 730) to Increase Yield

[0792] In furrow treatments with Bt.4Q7Flg22 (SEQ ID NO: 226) (Row Crop Composition 1), in combination with ACC deaminase (SEQ ID NO: 730) (Row Crop Composition 3), were conducted to determine if synergistic or additive effects resulted from the combination of the treatments. Yield impact of combination in furrow treatments was assessed on corn plants, hybrid P1197.

[0793] Replicated trials were conducted at 4 locations throughout the US Midwest (KS, MO, IL). Field seed beds at each location were prepared using conventional or conservation tillage methods for corn plantings. Fertilizer was applied as recommended by conventional farming practices and remained consistent between the US Midwest locations. A base treatment of 10-34-0 fertilizer at the rate of 2.5 gallons per acre was applied along with all treatments, including the control treatment. Herbicides were applied for weed control. Four-row plots, 39 feet (11.9 meters) long were planted at all locations. Corn seed was planted 1.75 to 2.25 inches (4.4 to 5.7 cm) deep, to ensure normal root development, at 30,000 to 35,000 plants per acre with row widths of 30 inches (76.2 cm). Three separate plots (replicates) per treatment were grown at each location, to account for field variability. Plots were maintained using the individual grower's production practices.

[0794] Bt.4Q7Flg22 bioactive priming polypeptide (SEQ ID NO: 226) (Row Crop Composition 1) or ACC deaminase (Row Crop Composition 3) were either applied alone, or in combination, at the rates indicated in Table 42. Corn yield in bushels per acre (Bu/Ac) was reported for each experimental replicate, and the average change in Bu/Ac and win rate relative to base fertilizer control were calculated across all sites as described in Example 6.

[0795] In furrow treatment with Bt.4Q7Flg22 (SEQ ID NO: 226) (Row Crop Composition 1) or ACC deaminase (Row Crop Composition 3) provided yield benefits over the control corn plants with an average of +1.39 Bu/Ac or +2.18 Bu/Ac, respectively (Table 44). Combined treatment resulted in an additive effect, with an observed+3.62 Bu/Ac increase in yield in comparison to the control, with an observed 75% win rate over the control plants. The Bt.4Q7Flg22 combination treatment with the ACC deaminase resulted in yield increases in corn greater than the increases of these treatments applied individually.

TABLE 44
In furrow treatment of corn with Bt.4Q7Flg22 (SEQ ID NO: 226) in
combination with ACC Deaminase to increase yield

| | | | | Average |
|---|---|---|---|---|
| | | | Average | Bu/Ac |
| | | Application | Total | Increase |
| | | Use | Yield | compared |
| Treatment—Corn | Treatment | Rate fl. | Bu/Ac | to |
| In Furrow | Method | oz/Ac | (4 sites) | Control |
| Base | — | — | 219.26 | — |
| (10-34-0 fertilizer; 2.5 | | | | |
| gallons per acre) | | | | |
| Base + Bt.4Q7Flg22 | In Furrow | 4 | 220.65 | +1.39 |
| (SEQ ID NO: 226) | | | | |
| (Row Crop Composition | | | | |
| 1) | | | | |
| Base + ACC Deaminase | In Furrow | 8 | 221.44 | +2.18 |
| [SEQ ID NO: 730] | | | | |
| Fermentation broth filtrate | | | | |
| with immobilized enzyme | | | | |
| (Row Crop Composition | | | | |
| 3) | | | | |
| Base + Bt.4Q7Flg22 | In Furrow | 4 | 222.88 | +3.62 |
| (SEQ ID NO: 226) | | | | |
| (Row Crop Composition | | | | |
| 1) + | | | | |
| ACC Deaminase | | 8 | | |
| [SEQ ID NO: 730] | | | | |
| Fermentation broth | | | | |
| filtrate with | | | | |
| immobilized enzyme | | | | |
| (Row Crop Composition | | | | |
| 3) | | | | |

[0796] Trials were established to further test the combination of ACC deaminase (ACCD) (SEQ ID NO: 730) and Bt.4Q7Flg22 (SEQ ID NO: 226) seed treatment applications to corn for increasing yield. For these trials, ACC deaminase (SEQ ID NO: 730) was expressed and purified, and enzyme activity was determined.

Cloning and Expression of pET28a-ACCD Free Enzyme Expression Construct.

[0797] The pET28a-ACCD plasmid was created by In Fusion cloning. Insert- and vector-specific PCR primers were used to amplify the pET28a vector and ACC deaminase insert sequences with overlapping ends. The PCR products were digested with the restriction enzyme DpnI for 1 hour at 37° C. Following purification, 20 ng of each DNA fragment was combined with In Fusion Premix (In Fusion Cloning Kit, Takara) and incubated for 15 minutes at 50° C. to create the plasmid sequence. This plasmid was then transformed into Stellar E. coli competent cells (Takara) by heat shock treatment at 42° C. followed by recovery at 37° C. in Luria-Bertani (LB) broth and plating on LB-ampillicin agar plates. The plates were incubated at 37° C. overnight. The construct sequence for transformant colonies was confirmed by PCR and sequencing. The pET28a-ACCD construct was then isolated from the Stellar E. coli cells using the Wizard SV Plus Minipreps DNA Purification System (Promega) and transformed into E. coli Bt.21 via electroporation in a 1 mM cuvette with the following parameters: 2.35 kV, 200 ohms, and 25 μFD. Transformants were selected on LB-kanamycin plates and the sequence of the construct was verified.

[0798] To express the ACC deaminase free enzyme in E. coli Bt.21, the cells were grown in LB auto-induction media containing lactose and a small concentration of glucose. Following initial depletion of the glucose, the cells were then induced automatically by the lactose in the culture. Cell lysis was performed with Bugbuster reagent (Millipore Sigma). The lysed cells were dialyzed against phosphate-buffered saline. Protein expression was verified by polyacrylamide gel electrophoresis.

### Determination of ACC Deaminase Enzyme Activity

[0799] ACCD enzyme activity was determined by a lactate dehydrogenase (LDH)-coupled assay. This enzyme converts 1-aminocyclopropane carboxylate (ACC) to α-ketobutyrate, which in turn can be reduced with NADH by LDH. The consumption of NADH was monitored by UV-VIS absorbance at 340 nm. The enzyme activity of ACC deaminase was then determined based on the absorbance change, following subtraction of the background.

Corn Seed Treatment with a Composition of ACC Deaminase and Flg22

[0800] Corn seed from two hybrids, Beck's 6127 BHMF and 6127 DVMF, were treated with Bt.4Q7Flg22 (SEQ ID NO: 226) (Row Crop Composition 6), ACC deaminase (SEQ ID NO: 730) (Row Crop Composition 7), or a combination of the two bioactive peptides in a standard seed treatment slurry at the rates indicated in Table 42. The standard slurry contained a fungicide, insecticide, beneficial bacteria, colorant and seed finisher (Prothioconazole 76.8 g/L, Metalazyl 61.4 g/L, Penflufen 38.4 g/L (0.031 mg ai/seed), Clothiandin (40.3%) with Bacillus firmus strain 1-1582 (8.10%) (0.6 mg ai/seed), Bacillus thuringiensis strain EX297512 (91.04% bacteria and carrier) (3 fl oz/unit) Peridium Quality 1006 (5 fl oz/cwt) and Pro-Ized Red Colorant (normal) (0.5 fl oz/cwt). Seed treatments were applied using a Wintersteiger HEGE II (Wintersteiger AG, Austria, Germany).

[0801] Seed was planted in 7 sites in the US Midwest (IL, IN), and each location was prepared using conventional or conservation tillage methods for corn plantings. Two-row plots, 17.5 feet long were planted at all locations. Corn seed was planted 1.75 to 2.25 inches (4.4 to 5.7 cm) deep, to ensure normal root development, at 30,000 to 35,000 plants per acre with row widths of 30 inches (76.2 cm). Three separate plots (replicates) per treatment were grown at each location, to account for field variability. Plots were maintained using the individual grower's production practices. Corn yield in bushels per acre (Bu/Ac) was reported for each experimental replicate, and the average change in Bu/Ac and win rate relative to base seed treatment control were calculated across all sites as described in Example 6.

[0802] Seed treatment with Bt.4Q7Flg22 (SEQ ID NO: 226) (Row Crop Composition 6) or ACC Deaminase (Row Crop Composition 7) provided yield benefits over the control corn plants with an average of +6.44 Bu/Ac or +7.16 Bu/Ac, respectively (Table 45). Combined treatment resulted in increased benefit, with an observed+9.16 Bu/Ac increase in yield in comparison to the seed treatment control, and an observed 71% win rate over the control plants. The Bt.4Q7Flg22 combination treatment with ACC deaminase resulted in yield increases in corn greater than the increases of these treatments applied individually.

TABLE 45
Corn seed treatment with ACC Deaminase free enzyme in combination
with Bt. 4Q7Flg22 to increase yield in corn

| | | | | Average |
|---|---|---|---|---|
| | | | Average | Bu/Ac |
| | | Application | Total | Increase |
| | | Use Rate | Yield | compared |
| Treatment—Corn | Treatment | per | Bu/Ac | to |
| Seed Treatment | Method | unit corn | (7 sites) | Control |
| Base Seed Treatment | — | — | 200.65 | — |
| Control | | | | |
| Base + Bt.4Q7Flg22 | Seed | 0.14 fl oz | 207.09 | +6.44 |
| (SEQ ID NO: 226) | Treatment | | | |
| (Row Crop Composition | | | | |
| 6) | | | | |
| Base + ACC Deaminase | Seed | 30 mU | 207.81 | +7.16 |
| [SEQ ID NO: 730] | Treatment | | | |
| Bacterial cell lysate with | | | | |
| free enzyme | | | | |
| (Row Crop Composition | | | | |
| 7) | | | | |
| Base + Bt.4Q7Flg22 | Seed | 0.14 fl oz | 209.81 | +9.16 |
| (SEQ ID NO: 226) | Treatment | | | |
| (Row Crop Composition | | | | |
| 6) + | | | | |
| ACC Deaminase | | 30 mU | | |
| [SEQ ID NO: 730] | | | | |
| Bacterial cell lysate with | | | | |
| free enzyme (Row Crop | | | | |
| Composition 7) | | | | |

### Example 13: Treatment with GmRHPP or RHPP Peptide Variants Increases Root Hair and Lateral Root Lengths

[0803] GmRHPP (SEQ ID NO:604) and RHPP-like peptide variants (SEQ ID NOs: 608, 607 and 745-755) were tested for ability to promote root hair elongation and lateral root elongation. To evaluate root architecture changes, field mustard (Brassica rapa) seeds were surface sterilized then added to bottles containing 10 μM peptide in Murashige and Skoog liquid culture with 0.25 g/L 2-(N-Morpholino) ethanesfulonic acid hydrate (pH 5.8). Field mustard seedlings were grown in liquid-culture bottles for approximately three days. After three days, seedling roots were stained with 0.1% methylene blue in 70% ethanol then imaged using a Dino-lite digital microscope. Lengths of root hairs and lateral roots were quantified in FIJI software using the “line measure tool”.

TABLE 46
Liquid culture treatment with GmRHPP or RHPP variants promotes
elongation of root hairs and lateral roots in liquid-culture grown field
mustard (Brassica rapa) seedlings

| | Experiment A: | Experiment B: Average |
|---|---|---|
| | Average Root Hair | Length of Three Longest |
| Treatment: | Length Per Plant (mm) | Lateral Roots Per Plant (mm) |
| Untreated Control | 0.137 | 0.632 |
| (UTC) | — | — |
| GmRHPP | 0.172 | 0.971 |
| SEQ ID NO: 604 | (125% of UTC) | (154% of UTC) |
| (10 μM) | | |
| RHPP-Gm1 | 0.185 | 1.034 |
| SEQ ID NO: 608 | (135% of UTC) | (164% of UTC) |
| (10 μM) | | |
| RHPP-Gm2 | 0.169 | 0.953 |
| SEQ ID NO: 607 | | |
| (10 μM) | (123% of UTC) | (151% of UTC) |
| RHPP-Pp | 0.145 | 0.853 |
| SEQ ID NO: 745 | (105% of UTC) | (135% of UTC) |
| (10 μM) | | |
| RHPP-Mc | 0.165 | 0.822 |
| SEQ ID NO: 746 | (120% of UTC) | (130% of UTC) |
| (10 μM) | | |
| RHPP-Bd | 0.137 | 0.959 |
| SEQ ID NO: 747 | (99% of UTC) | (152% of UTC) |
| (10 μM) | | |
| RHPP-Va | 0.151 | 0.929 |
| SEQ ID NO: 748 | (110% of UTC) | (147% of UTC) |
| (10 μM) | | |
| RHPP-Ls | 0.182 | 1.058 |
| SEQ ID NO: 749 | (132% of UTC) | (168% of UTC) |
| (10 μM) | | |
| RHPP-Vr | 0.147 | — |
| SEQ ID NO: 750 | (107% of UTC) | — |
| (10 μM) | | |
| Syn01 RHPP | 0.154 | 0.964 |
| SEQ ID NO: 751 | (112% of UTC) | (153%) |
| (10 μM) | | |
| Syn02 RHPP | 0.150 | 0.932 |
| SEQ ID NO: 752 | (109% of UTC) | (148% of UTC) |
| (10 μM) | | |
| Syn03 RHPP | 0.153 | 0.954 |
| SEQ ID NO: 753 | (112% of UTC) | (151% of UTC) |
| (10 μM) | | |
| Syn04 RHPP | 0.164 | — |
| SEQ ID NO: 754 | (120% of UTC) | — |
| (10 μM) | | |
| Syn05 RHPP | 0.152 | 0.932 |
| SEQ ID NO: 755 | (111% of UTC) | (147% of UTC) |
| (10 μM) | | |

[0804] Results (Table 46) indicate that GmRHPP (SEQ ID NO: 604) and almost all RHPP peptide variants tested (SEQ ID NOs: 607, 608, 745, 746, 748, 749, 750, 751, 752, 753, 754, 755) increased average root hair length compared to untreated control. The only exception was RHPP-Bd (SEQ ID NO: 747) which did not improve root hair elongation. Treatment with RHPP-Gm1, RHPP-Ls, and GmRHPP peptides correlated to the greatest increases in root hair length relative to control (+35%, +32% & +25%, respectively). Increased average lateral root length compared to untreated control was observed for seedlings treated with GmRHPP (SEQ ID NO: 604) or all tested RHPP peptide variants (SEQ ID NOs: 607, 608, 745, 746, 747, 748, 749, 750, 751, 752, 753, 754, 755). Treatment with RHPP-Ls, RHPP-Gm1, and GmRHPP peptides correlated to the greatest increases in average lateral root length relative to control (+68%, +64% & +54%, respectively). RHPP and RHPP-like peptides can be used to stimulate root growth of soil grown, hydroponic or aeroponic grown plants, to improve nutrient update and increase biomass. RHPP and RHPP-like peptides could be used in combination with other bioactive peptides to stimulate root growth, while also reducing abiotic and biotic stress, and increasing yield.

### Example 14: Gm.RHPP Foliar Application in Combination with Foliar Fungicides Containing a Succinate Dehydrogenase Inhibitor (SDHI) Provides Enhanced Plant Protection Against Phakopsora pachyrhizi

[0805] In January 2019, replicated field trials were conducted across three locations in Paraguay (Capitan Meza, Capitan Miranda, Natalio) using a foliar application comprising a Gm.RHPP peptide and a broad-spectrum fungicide Cripton XPro (12.5% Bixafen, 17.5% Prothioconazole, 15% Trifloxystrobin) with three modes of action. Cripton XPro is a commercially available foliar fungicide for preventative and curative treatment of Asian Soybean Rust (ASR) caused by Phakopsora pachyrhizi when applied as a foliar spray following the recommendation on the specimen label at a use rate of 6.84 fluid ounces per acre (Fl. oz/Ac) (500 mL/hectare). Due to rapidly evolving resistance of P. pachyrhizi and other pathogens to triazole class fungicides, new modes of action are needed to extend the efficacy of chemical fungicides and promote crop resistance and yield. Bixafen is an example of a highly effective succinate dehydrogenase inhibitor activity (SDHI) group fungicide, of the pyrazole carboxamide class, that disrupt fungal cell energy production. Trials were established to test co-treatment of plants with the Cripton XPro formulation of bixafen and bioactive peptides, such as Gm.RHPP (SEQ ID NO: 604), for control of ASR.

[0806] Beginning at the R1 stage of development, soybean plants received three foliar applications of the compositions described in Table 47 with an interval of 10-14 days between applications. Foliar applications were applied to soybeans, with four replicated plots (3×10 meters, 30 m2; 6 rows) per treatment at each independent sites (total of 12 replicates per treatment) Plants became naturally infected with P. pachyrhizi through environmental pressure, and plots were scored for severity of infection (0-100% foliage affected) for 10 plants within each plot at the late R6 stage of soy development with guidance from Godoy et al (1997; Journal of plant disease and protection 104: 336-345). At approximately the R7 stage of development, soybean plants were scored for defoliation (0-100% defoliated). Disease severity, defoliation and yield results are provided in Table 47.

TABLE 47
Yield and severity of Asian Soybean Rust disease symptoms after foliar
application of SDHI fungicide and Gm.RHPP compositions in Paraguay

| | Application | Asian Soybean | | |
|---|---|---|---|---|
| | Use Rate in | Rust Disease | Defoliation | |
| | Fluid | Scores | Percentage | |
| | Ounces/Acre | (% Severity) | (% of foliage) | Yield (kg/Ha) |
| Foliar | Milliliters/ | (Comparisons | (Comparisons | (Comparisons |
| Treatment | hectare | Below) | Below) | Below) |
| Untreated | n/a | 75.0% | 90.0% | 1,269 |
| Control | | — | — | — |
| (UTC) | | | | |
| Cripton | 6.84 Fl oz/Ac | 26.7% | 46.7% | 2.,039 |
| XPro | 500 mL/Ha | (−48.3% to | (−43.3% to | (+770 kg to |
| Fungicide | | UTC) | UTC) | UTC) |
| Cripton | 6.84 Fl oz/Ac | 20.0% | 35.0% | 2,603 |
| XPro | 500 mL/Ha + | (−55.0% to | (−55.0% to | (+1,334 to |
| Fungicide + | 4.11 Fl oz/Ac | UTC) | UTC) | UTC) |
| Gm.RHPP | 300 mL/Ha | (−6.7% to | (−11.7% to | (+564 to |
| (SEQ ID | | CriptonXPro) | Cripton | Cripton |
| NO: 604) | | | XPro) | XPro) |

[0807] Foliar application of Gm.RHPP in combination with the fungicide Cripton XPro during reproductive phases of soy development provided increased protection against ASR as compared to the Untreated Control or Cripton XPro alone. Combination treatment with Gm.RHPP+Cripton XPro decreased ASR disease severity scores to 27% of the Untreated control and 75% of Cripton)(Pro. Combination treatment with Gm.RHPP+Cripton XPro decreased defoliation percentages to 39% of the Untreated control and 75% of Cripton XPro. Combination treatment with Gm.RHPP+Cripton XPro increased yield to 205% of the Untreated control and 127% of Cripton XPro. Based on these results, a soybean disease management program that included Gm. RHPP would be expected to reduce ASR foliar symptoms and defoliation, thus increasing grain fill and yield compared to the standard fungicide alone.

### Example 15: Trunk Injection of Oxytetracycline+Bacillus subtilis Serine Protease 2 Increases Fruit Yield on Citrus Trees Infected with CLas

[0808] As described in Example 1, co-injection treatments of oxytetracycline (0.48 g, or 0.93 g) with fermentation filtrate containing Serine Protease 2 (BsSP2) (SEQ ID NO: 795) were tested for ability to increase ‘Hamlin’ orange yield and/or decrease fruit drop. Trials were arranged with 10 trees per treatment, with two replicated blocks of five trees each in Okeechobee County, FL. The results are summarized in Table 48 below.

TABLE 48
Trunk injection of oxytetracycline combination with BsSP2 increased ‘Hamlin’
fruit yield relative to oxytetracycline alone

| | Average Yield (kg | Average Yield (Fruit |
|---|---|---|
| Treatment | fruit per tree) | Count per Tree) |
| Citrus Composition 3 | 12.65 | 84.75 |
| Oxytetracycline-HCl | — | — |
| (24.1 mg/mL); 20 mL/tree injection (0.48 | | |
| g/tree) | | |
| Citrus Composition 19 | 15.68 | 105.00 |
| Oxytetracycline-HCl | (124% relative to | (124% relative to |
| (24.1 mg/mL); 20 mL/tree injection (0.48 | Composition 3) | Composition 3) |
| g/tree) + | | |
| BsSP2 (SEQ ID NO: 795); 20 mL/tree | | |
| injection | | |

[0809] Results indicate that a citrus management program that included co-injection of oxytetracycline with BsSP2 would be expected to provide, on average, a 24% increase in yield relative to oxytetracycline alone (Table 48).

### Example 16: Trunk Injection of Oxytetracycline and 2-Deoxy-D-Glucose Increases Fruit Yield and Juice Quality and Reduces Fruit Drop on Citrus Trees Infected with CLas

[0810] As described in Example 1, oranges of the ‘Vernia’ and ‘Valencia’ varieties were harvested from trials designed to test the efficacy of co-injection treatments of oxytetracycline (0.48 g or 0.93 g) with 2-Deoxy-D-Glucose (2-DDG), with respect to orange yield, fruit quality, and/or juice quality. Trials were arranged with 10 trees per treatment, with two replicated blocks of five trees each. At the time of harvest, two representative fruit were collected per tree for fruit and juice quality assessment, as described in Example 1. The results are summarized in Tables 49, 50, and 51 below.

TABLE 49
Trunk injection of oxytetracycline (0.93 g per tree) in combination with 2-deoxy-
D-glucose increased ‘Vernia’ and ‘Valencia’ fruit yield relative to untreated control

| | Average Yield | Average Yield | Calculated |
|---|---|---|---|
| | (kg fruit per | (Fruit Count per | Average Weight |
| Treatment | tree) | Tree) | per Fruit (g) |
| | Vernia | | |
| Untreated Control (UTC) | 50.88 | 327.2 | 157.93 |
| Citrus Composition 24 | 57.35 | 368.4 | 151.67 |
| Oxytetracycline-HCl | (113% of UTC) | (113% of UTC) | (96% of UTC) |
| (24.1 mg/mL); 20 mL/tree | | | |
| injection (0.93g/tree) + | | | |
| 2-DDG (5.56 mg/mL solution | | | |
| in water); 20 mL/tree injection | | | |
| (111.1 mg/tree) | | | |
| | Valencia | | |
| Untreated Control (UTC) | 37.05 | 239.4 | 157.92 |
| Citrus Composition 24 | 47.17 | 279.9 | 168.33 |
| Oxytetracycline-HCl | (127% of UTC) | (117% of UTC) | (107% of UTC) |
| (48.6 mg/mL); 20 mL/tree | | | |
| injection (0.93 g/tree) + | | | |
| 2-DDG (5.56 mg/mL solution | | | |
| in water); 20 mL/tree injection | | | |
| (111.1 mg/tree) | | | |

[0811] Increased yield (kg/tree) was observed after co-injection of oxytetracycline and 2-DDG, relative to the untreated control. Increased total yield was due in part to increased number of fruit per tree (Vernia and Valencia) and increased fruit size (Valencia).

TABLE 50
Trunk injection of oxytetracycline (0.48 g per tree) in combination with 2-deoxy-
D-glucose increased ‘Vernia’ fruit yield relative to untreated control and oxytetracycline
alone

| | | | | | Average |
|---|---|---|---|---|---|
| | | Average | | | Fruit |
| | Average | Yield | Calculated | | Drop |
| | Yield (kg | (Fruit | Average | Average | (percent |
| | fruit per | Count per | Weight per | Diameter | of total |
| Treatment | tree) | Tree) | Fruit (g) | (mm) | fruit) |
| Untreated Control | 51.33 | 325.2 | 162.56 | 65.64 | 3.58% |
| (UTC) | — | — | — | — | — |
| Citrus Composition 3 | 55.17 | 309.6 | 178.36 | 63.33 | 4.61% |
| Oxytetracycline-HCl | (107% of | (95% of | (110% of | (96% of | (Δ + 1.04% |
| (24.1 mg/mL); 20 | UTC) | UTC) | UTC) | UTC) | to UTC) |
| mL/tree injection (0.48 | — | — | — | — | — |
| g/tree) | | | | | |
| Citrus Composition 24 | 72.56 | 478.0 | 172.4 | 70.17 | 3.24% |
| Oxytetracycline-HCl | (141% of | (147% of | (106% of | (107% of | (Δ − 0.34% to |
| (24.1 mg/mL); 20 | UTC) | UTC) | UTC) | UTC) | UTC) |
| mL/tree injection (0.48 | (132% | (154% | (97% | (111% | (Δ − 1.37% to |
| g/tree) + | relative to | relative to | relative to | relative to | Composition |
| 2-DDG (5.56 mg/mL | Composition | Composition | Composition | Composition | 3) |
| solution in water); 20 | 3) | 3) | 3) | 3) | |
| mL/tree injection | | | | | |
| (111.1 mg/trees) | | | | | |

[0812] Increased yield (compared to plants that were untreated or treated with oxytetracycline) was observed for co-injection of oxytetracycline and 2-DDG. Results indicate that a citrus management program that included co-injection of oxytetracycline with 2-DDG could be expected to provide, on average, a 27% increase in yield, 26% increase in fruit count, and 2.9% increase in fruit size relative to untreated (Table 49 and Table 50). Table 50 above indicates an 11% increase in fruit diameter relative to injection of oxytetracycline alone, coupled with a 1.37% decrease in fruit drop, which contribute to increased yield.

[0813] Co-injection treatment of oxytetracycline (0.93 g) with 2-DDG was tested for ability to increase ‘Vernia’ and ‘Valencia’ juice quality. The results are summarized in Table 51 below.

TABLE 51
Trunk injection of oxytetracycline combination with 2-deoxy-D-glucose increased
‘Vernia’ and ‘Valencia’ juice quality relative to oxytetracycline alone

| Treatment | Brix value | Brix:CA Ratio |
|---|---|---|
| | ‘Vernia’ | |
| Citrus Composition 2 | 9.40 | 19.58 |
| Oxytetracycline-HCl | — | — |
| (48.6 mg/mL); 20 mL/tree injection (0.93 g/tree) | | |
| Citrus Composition 24 | 9.90 | 18.68 |
| Oxytetracycline-HCl | (+0.50 relative to | (−0.90 relative to |
| (48.6 mg/mL); 20 mL/tree injection (0.93 g/tree) + | Composition 2) | Composition 2) |
| 2-DDG (5.56 mg/mL solution in water); 20 | | |
| mL/tree injection (111.1 mg/tree) | | |
| | ‘Valencia’ | |
| Citrus Composition 2 | 11.73 | 10.30 |
| Oxytetracycline-HCl | — | — |
| (48.6 mg/mL); 20 mL/tree injection (0.93 g/tree) | | |
| Citrus Composition 16 | 12.30 | 12.42 |
| Oxytetracycline-HCl | (+0.58 relative to | (+2.12 relative to |
| (48.6 mg/mL); 20 mL/tree injection (0.93 g/tree) + | Composition 2) | Composition 2) |
| 2-DDG (5.56 mg/mL solution in water); 20 | | |
| mL/tree injection (62.9 mg/tree) | | |

[0814] Increased yield (compared to plants that were untreated or treated with oxytetracycline) was observed for co-injected treatments with oxytetracycline and 2-DDG. Results indicate that a citrus management program that included co-injection of oxytetracycline with 2-DDG would be expected to provide, on average, a +0.54 increase in Brix and a +0.61 increase in the Brix:CA Ratio relative to injection of oxytetracycline alone (Table 51; average of Valencia and Vernia juice quality results).

### Example 17: Polysaccharide Degradation from Recovery Enzyme Treatments with Inducer Compounds for Use in the Treatment of Citrus Disease

[0815] Combinations of recovery compositions that were used to restore plant health and increase fruit yield in HLB-infected citrus trees by the reduction of phloem-blocking callose polysaccharides were further examined for the degradation of β-1,3 linked glucan polymers in kinetic assays. To demonstrate enzyme activity, various β-1,3-D-glucanases (SEQ ID NO: 731, 732, 768, 770, 772, 773, 774, 775, 776) were tested for activity on β-1,3-glucan from Euglena gracilis (Table 52), and two α-amylases (SEQ ID NO: 734, 735) were tested for activity on starch.

[0816] Amounts of 0.05 g of β-1,3-glucan (unbranched 13-1,3-linked glucose residues) from Euglena gracilis weighed and dissolved in 8.75 mL 2.5 M NaOH sodium hydroxide (CAS #1310-73-2) and diluted to 10 mL in glacial acetic acid (64-19-7) to bring the pH to 7. For each enzyme, 8.0 μL of enzyme preparation was added, in duplicate, to a 96-well plate, containing 52 μL of 50 mM citrate buffer, pH 4.9, or 300 nL of enzyme preparation diluted in 59.7 μL 50 mM citrate buffer, pH 4.9 was added, in duplicate, to a 96-well plate. 80 μL of 5 g/L β-1,3-glucan from Euglena gracilis in 87.5 g/L sodium hydroxide, pH 7 was added to each well and kept at a consistent temperature of 37° C. After 30 to 60 minutes, 120 μL of coloring solution containing 10 g/L 3,5-dinitrosalicylic acid (CAS #609-99-4), 10 g/L NaOH (CAS #1310-73-2), 0.5 g/L Na₂SO₄ (CAS #7757-82-6), 2.0 g/L Phenol (CAS #108-95-2), 182 g/L potassium sodium tartrate (CAS #6381-59-5), and 0.18 g/L glucose (CAS #50-99-7) was added to each well of the 96-well plate. With the addition of heat (10 minutes at 99.9° C.), reduction of the 3,5-dinotrosalicylic acid to 3-amino-5-nitrosalicylic acid by the freed glucose resulted in a maximum absorbance change of the reaction mixture from 375 nm to 540 nm. Absorbances at 540 nm (A₅₄₀) from 200 μL of reaction mixture were recorded with a BioTek spectrophotometer. For data analysis, the average A_{540 nm} value 30 or 60 min post-treatment is reported (n=2-3 samples per treatment) in Table 52.

TABLE 52
Glucanase activity assays of β-1,3-D-glucanases on β-1,3-glucan from Euglena
gracilis

| Treatment | A₅₄₀ | |
|---|---|---|
| (n = 2 replicates per treatment) | 30 min post- treatment | Blank subtracted A₅₄₀ |
| Blank (mock treatment) | 0.381 | 0.000 |
| β-1,3-D-glucanase (BglH) from | 1.042 | 0.662 |
| Paenibacillus spp. (SEQ ID NO: 732) | | |
| β-1,3-D-glucanase (HvGii) from Hordeum | 0.426 | 0.045 |
| vulgare (SEQ ID NO: 731) | | |
| β-1,3-D-glucanase (LamA1) from | 0.448 | 0.067 |
| Paenibacillus sp. CCRC17245 (SEQ ID | | |
| NO: 768) | | |
| β-1,3-D-glucanase (CsPr2) from Citrus | 0.394 | 0.014 |
| sinensis (SEQ ID NO: 770) | | |
| β-1,3-D-glucanase (DK-1) from | 1.284 | 0.903 |
| Cellulosimicrobium cellulans strain .DK-1 | | |
| (SEQ ID NO: 772) | | |
| β-1,3-D-glucanase (QLK1) from | 0.687 | 0.307 |
| Kitasatospora phosalacinea strain | | |
| SYBCQL (SEQ ID NO: 773) | | |
| β-1,3-D-glucanase (17-W) from | 0.734 | 0.353 |
| Streptomyces sp. SYBC17 (SEQ ID NO: | | |
| 774) | | |
| β-1,3-D-glucanase (BglS27) from | 0.882 | 0.501 |
| Streptomyces sp. S27 (SEQ ID NO: 775) | | |
| β-1,3-D-glucanase (BglM) from | 0.716 | 0.336 |
| Paenibacillus sp IAM1165 (SEQ ID NO: | | |
| 776) | | |

[0817] Glucanase activity assay results (Table 52) indicated that glucanases from various sources, including plants, gram-negative bacteria, and gram-positive bacteria, have activity on β-1,3-glucan from Euglena gracilis, an unbranched polymer of glucose residues linked by β-1,3 glycosidic bonds. Euglena gracilis, a eukaryote, makes a glucan predicted to have a structure similar to the callose found in the phloem of a citrus tree.

[0818] To test for compatibility between β-1,3-D-glucanase in a recovery enzyme mixture, a tank mix of β-1,3-D-glucanase from Hordeum vulgare (SEQ ID NO: 731), L-Cysteine (Treatment D), and α-amylase from Bacillus licheniformis (Treatment C) SEQ ID NO: 735) were compared (Table 53) with β-1,3-D-glucanase alone (Treatment A). The β-1,3-D-glucanase combination with L-Cysteine and α-amylase (Treatment B) were assayed for glucanase activity which was specifically selected to model co-injection of the recovery enzyme mixture on citrus trees used for Ruby Red grapefruit and Valencia oranges (Examples 3 and 20). Combination concentrations of β-1,3-D-glucanase from Hordeum vulgare with L-Cysteine and α-amylase were matched to injection concentrations as used for the injection of Ruby Red grapefruit and Valencia oranges in Table 53. Final concentrations for β-1,3-D-glucanase from Hordeum vulgare (SEQ ID NO: 731) (33 U/mL); L-cysteine (0.0133 mg/mL) and α-amylase from Bacillus licheniformis (SEQ ID NO: 735) (33 U/mL) in 50 mM citrate buffer, pH 4.9 were used in the glucanase activity assays.

TABLE 53
Glucanase activity assays of β-1,3-D-glucanase from Hordeum vulgare
used in combination
with recovery citrus compounds

| | A₅₄₀ | Blank | Change |
|---|---|---|---|
| Treatment | 60 min post- | subtracted | relative to |
| (n = 3 replicates per treatment) | treatment | A₅₄₀ | Treatment A |
| Blank (buffer only) | 0.414 | 0.000 | 0.000 X |
| Treatment A | 0.522 | 0.108 | 1.0 X |
| β-1,3-D-glucanase from Hordeum vulgare | | | |
| (SEQ ID NO: 731), 33 U/mL | | | |
| Treatment B | 0.514 | 0.101 | 0.93 X |
| β-1,3-D-glucanase from Hordeum vulgare | | | |
| (SEQ ID NO: 731), 33 U/mL + | | | |
| α-amylase from Bacillus licheniformis | | | |
| (SEQ ID NO: 735), 33 U/mL + | | | |
| L-Cysteine CAS 136743-62-9 | | | |
| 0.013 mg/mL | | | |
| Treatment C | 0.383 | −0.031 | −0.29 X |
| α-amylase from Bacillus licheniformis | | | |
| (SEQ ID NO: 735), 33 U/mL | | | |
| Treatment D | 0.373 | −0.041 | −0.38 X |
| L-Cysteine CAS 136743-62-9 | | | |
| 0.013 mg/mL | | | |

[0819] Glucanase activity assay results (Table 53) indicated that L-Cysteine, an inducer compound, and α-amylase, a starch degrader, provided in combination with the β-1,3-D-glucanase (Treatment B) resulted in a glucanase response that was similar to the response output from β-1,3-D-glucanase alone (Treatment A). Additionally, L-Cysteine and α-amylase, provided alone (Treatments C & D) and in combination with the β-1,3-D-glucanase (Treatment B) did not show additional glucanase activity by synthesizing glucose or degrading glucans but also did not significantly hinder the response of the β-1,3-D-glucanase and are therefore found compatible in the recovery enzyme mixture.

[0820] For data in Table 54 below, an amount of 0.1 g of starch (unbranched α-1,4-linked glucose residues) from Solanum tuberosum was suspended in 1.0 mL room temperature 10× Phosphate Buffered Saline (PBS), pH 6.9 and then dissolved into 9 mL boiling water. For Treatments A-D, 0.165 nL of enzyme preparation diluted in 1×PBS, pH 6.9 were added, in triplicate, to a 96-well plate. For Treatments E-G, 9.4 nL of enzyme preparation in 1×PBS, pH 6.9 were added, in triplicate, to a 96-well plate. 40 μL of 10 g/L starch in 1×PBS, pH 6.9 was added to each well and kept at a consistent temperature of 37° C. After 10 minutes, 60 μL of coloring solution containing 10 g/L 3,5-dinitrosalicylic acid (CAS #609-99-4), 10 g/L NaOH (CAS #1310-73-2), 0.5 g/L Na2SO4 (CAS #7757-82-6), 2.0 g/L Phenol (CAS #108-95-2), and 182 g/L potassium sodium tartrate (CAS #6381-59-5) was added to each well of the 96 well plate. With the addition of heat (10 minutes at 99.9° C.), reduction of the 3,5-dinotrosalicylic acid to 3-amino-5-nitrosalicylic acid by the freed glucose resulted in a maximum absorbance change of the reaction mixture from 375 nm to 540 nm. Absorbances at 540 nm (A540) from 100 μL of reaction mixture were recorded with a BioTek spectrophotometer. For data analysis, the average A540 nm value 10 minutes post-treatment is reported (n=2-3 samples per treatment).

TABLE 54
Amylase activity assays of β-amylase from Bacillus licheniformis used in
combination with recovery citrus compounds

| | A₅₄₀ | Blank | Change |
|---|---|---|---|
| Treatment | 10 min post- | subtracted | relative to |
| (n = 2-3 replicates per treatment) | treatment | A₅₄₀ | Treatment A |
| Blank (buffer only) | 0.184 | 0.000 | 0.000 X |
| Treatment A | 0.590 | 0.406 | 1.0 X |
| α-amylase from Bacillus licheniformis | | | |
| (SEQ ID NO: 735), 33 U/mL | | | |
| Treatment B | 0.659 | 0.475 | 1.17X |
| β-1,3-D-glucanase from Hordeum vulgare | | | |
| (SEQ ID NO: 731), 33 U/mL + | | | |
| α-amylase from Bacillus licheniformis | | | |
| (SEQ ID NO: 735), 33 U/mL + | | | |
| L-Cysteine CAS 136743-62-9 | | | |
| 0.013 mg/mL | | | |
| Treatment C | 0.214 | 0.030 | 0.07 X |
| β-1,3-D-glucanase from Hordeum vulgare | | | |
| (SEQ ID NO: 731), 33 U/mL | | | |
| Treatment D | 0.207 | 0.023 | 0.06 X |
| L-Cysteine CAS 136743-62-9 | | | |
| 0.013 mg/mL | | | |
| Treatment E | 0.374 | 0.190 | 1.0 X |
| α-amylase from Bacillus subtilis 168 | | | |
| (SEQ ID NO: 734), 60 U/mL + | | | |
| cell supernatant from Bacillus subtilis | | | |
| 168 | | | |
| Treatment F | 0.465 | 0.281 | 1.48 X |
| α-amylase from Bacillus subtilis 168 | | | |
| (SEQ ID NO: 734), 60 U/mL + | | | |
| 2-DDG CAS 154-17-6 (6.94 mg/mL) + | | | |
| cell supernatant from Bacillus subtilis | | | |
| 168 | | | |
| Treatment G | 0.257 | 0.073 | 0.38 X |
| 2-DDG CAS 154-17-6 | | | |
| 6.94 mg/mL + cell supernatant from | | | |
| Bacillus subtilis 168 | | | |

[0821] Amylase activity assay results (Table 54) indicated that L-Cysteine, an inducer compound, and β-1,3-D-glucanase, a callose degrader, provided in combination with the α-amylase (Treatment B) resulted in an increased amylase activity response that was similar to the response output from the α-amylase and 2-DDG (Treatment F). Additionally, L-Cysteine and β-1,3-D-glucanase, provided alone (Treatments C & D) and in combination with the α-amylase (Treatment B) did not show significant amylase activity by synthesizing glucose or degrading starch but also did not hinder the response of the α-amylase and are therefore found compatible (Table 54).

[0822] Amylase activity assay results (Table 54) indicated that 2-DDG, which is used as a callose synthase inhibitor, provided in combination with α-amylase (Treatment F), did not show significant additional amylase activity beyond the additions of Treatments E and G (p=0.23) (Treatment G is a reducing sugar that acts on 3,5-dinitrosalicylic acid but does not have enzymatic activity on starch or other polysaccharides). This was an expected result as 2-DDG, used to reduce callose content in the phloem, does not synthesize glucose or degrade starch, but also did not hinder the response (activity) of the α-amylase and therefore is compatible in this recovery enzyme mixture.

[0823] Example 4 (Table 34) demonstrates how L-cysteine cysteine assists other actives to activate the plant immune system outside of glucanase and amylase activity. The Recovery Enzyme Mixture described in Example 10 (Table 42) and Example 17 (Tables 53, and 54), describe a combinatorial synergistic approach to clear the callose (a β-1,3 glucan polymer) and starch (an α-1,4-glucose polymer) buildup in citrus phloem to improve nutrient transport while helping to induce immune system activation to combat a Clas infection.

### Example 18: Polysaccharide Degradation from β-1,3-Endoglucanase for Use in the Treatment of Fungal Disease

[0824] Combinations of recovery compositions that were used to restore plant health and increase fruit yield in HLB-infected citrus trees by the reduction of phloem-blocking callose polysaccharides were further examined for the degradation of β-1,3 linked glucan polymers in kinetic assays. To demonstrate enzyme activity, various β-1,3-D-glucanases (SEQ ID NO: 731, 732, 767, 772, 773, 774, 775, 776) were tested for activity on carboxymethyl-pachyman (CM-pachyman) (CAS 69552-83-6), derived from a 1,3-β-D-glucan from the sclerotia of Poria cocos, a wood-decay fungus (Table 55). CM-pachyman was carboxymethylated with chloroacetic acid to increase solubility in aqueous solutions.

[0825] An amount of 0.125 g of CM-pachyman from Poria cocos was dissolved in 23.5 mL water, at 90° C., and diluted to 25 mL in 0.5 M sodium citrate buffer, pH 4.9. For each enzyme, 5.0 μL of enzyme preparation was added, in duplicate, to a 96-well plate, containing 55 μL of 50 mM citrate buffer, pH 4.9. 80 μL of 5 g/L CM-pachyman from Poria cocos in 50 mM citrate buffer, pH 4.9 was added to each well and kept at a consistent temperature of 37° C. After 30 minutes, 120 μL of coloring solution containing 10 g/L 3,5-dinitrosalicylic acid (CAS #609-99-4), 10 g/L NaOH (CAS #1310-73-2), 0.5 g/L Na2SO4 (CAS #7757-82-6), 2.0 g/L Phenol (CAS #108-95-2), 182 g/L potassium sodium tartrate (CAS #6381-59-5), and 0.18 g/L glucose (CAS #50-99-7) was added to each well of the 96-well plate. With the addition of heat (10 minutes at 99.9° C.), reduction of the 3,5-dinotrosalicylic acid to 3-amino-5-nitrosalicylic acid by the freed glucose resulted in a maximum absorbance change of the reaction mixture from 375 nm to 540 nm. Absorbances at 540 nm (A540) from 200 μL of reaction mixture were recorded with a BioTek spectrophotometer. For data analysis, the average A540 nm value 30 min post-treatment is reported (n=2 samples per treatment).

TABLE 55
Glucanase activity assays of β-1,3-D-glucanases on CM-pachyman
from Poria cocos

| Treatment | A₅₄₀ | |
|---|---|---|
| (n = 2 replicates per treatment) | 30 min post- treatment | Blank subtracted A₅₄₀ |
| Blank (mock treatment) | 0.350 | 0.000 |
| β-1,3-D-glucanase (HvGii) from Hordeum | 0.626 | 0.276 |
| vulgare (SEQ ID NO: 731) | | |
| β-1,3-D-glucanase (BglH) from | 0.765 | 0.415 |
| Paenibacillus spp. (SEQ ID NO: 732) | | |
| β-1,3-D-glucanase (LamA1) from | 0.402 | 0.052 |
| Paenibacillus sp. CCRC17245 (SEQ ID | | |
| NO: 767) | | |
| β-1,3-D-glucanase (DK-1) from | 0.853 | 0.503 |
| Cellulosimicrobium cellulans strain .DK-1 | | |
| (SEQ ID NO: 772) | | |
| β-1,3-D-glucanase (QLK1) from | 0.592 | 0.242 |
| Kitasatospora phosalacinea strain | | |
| SYBCQL (SEQ ID NO: 773) | | |
| β-1,3-D-glucanase (17-W) from | 0.556 | 0.206 |
| Streptomyces sp. SYBC17 (SEQ ID NO: | | |
| 774) | | |
| β-1,3-D-glucanase (BglS27) from | 0.637 | 0.287 |
| Streptomyces sp. S27 (SEQ ID NO: 775) | | |
| β-1,3-D-glucanase (BglM) from | 0.705 | 0.268 |
| Paenibacillus sp IAM1165 (SEQ ID NO: | | |
| 776) | | |

[0826] Glucanase activity assay results (Table 55) indicated that glucanases from various sources (β-1,3-D-glucanase listed as SEQ ID Nos: 731, 732, 767, 772, 773, 774, 775 and 776) which include glucanases from gram-negative bacteria and gram-positive bacteria, have activity on CM-pachyman from Poria cocos, an unbranched polymer of glucose residues linked by β-1,3 glycosidic bonds with glucanases of SEQ ID Nos: 732 and 772 having the highest activities. Polysaccharides, including β-1,3-linked polymers, are a key component of fungal cell walls and any of the above enzymes demonstrating activity degrading β-1,3-linked glucose-based polysaccharides would have activity on the fungal cell wall and lead to lysis of fungal pathogens.

### Example 19: Trunk Injection of Recovery-Promoting Enzyme Compositions Increase Fruit Yield and Juice Quality on Citrus Trees Infected with Clas

[0827] Treatments as previously described in Example 3; β-1,3-Endoglucanase from barley SEQ ID NO: 731 (Treatment 1) and Bt.4Q7Flg22 from Bacillus thurigiensis SEQ ID NO: 226 (Treatment 5) increased fruit yield (kg/tree) as described in Table 56. Fruit quality, and juice quality of ‘Valencia’ oranges are described in Table 57.

TABLE 56
Trunk injection of recovery compositions increased ‘Grapefruit’ and ‘Valencia’
fruit yield relative to untreated trees

| | Average Yield (kg per tree) | | |
|---|---|---|---|
| | (Relative to Untreated) | | |
| Treatment | ‘Ruby Red’ | ‘Valencia’ | Average of 2 sites |
| Untreated | 34.6 | 40.3 | |
| | — | — | — |
| Bt.4Q7Flg22 | 37.2 | 48.1 | |
| (SEQ ID NO: 226) (0.33 mg/tree) | (108%) | (119%) | (113%) |
| B-1,3-Endoglucanase | 38.7 | 54.8 | |
| from Barley (SEQ ID NO: 731) (2660 U/tree) | (112%) | (136%) | (124%) |
| L-Cysteine | 34.8 | 42.3 | |
| (0.27 mg/tree) | (101%) | (105%) | (103%) |
| Recovery Enzyme Mixture | 35.1 | 46.8 | |
| B-1,3-Endoglucanase from Barley (SEQ ID | (102%) | (116%) | (109%) |
| NO: 731) (660 U/tree) + Amylase from Bacillus | | | |
| licheniformis (SEQ ID NO: 735) (660 U/tree) + | | | |
| Cysteine (0.27 mg/tree) | | | |

[0828] For direct comparison of the treatment results between grapefruit (‘Ruby Red’) and orange (‘Valencia’) are referenced in Table 56 above. Harvest results from replicated ‘Ruby Red’ grapefruit trials and described individually in Table 32 indicated that trunk injection treatments to activate the plant immune system, degrade polysaccharides in and around sieve tube elements, and provide essential amino acids for sustained defense responses (L-cysteine) resulted in increased fruit yield. Table 56 provides a summary of the harvest results from “Ruby Red” grapefruit trials and ‘Valencia’ orange trials and an average of 2 sites for each citrus variety. On ‘Valencia’ trees, Bt.4Q7Flg22 injection at 0.33 mg per tree increased yield 7.8 kg per tree compared to the untreated control (combined average 113%), while the callose-degrading enzyme β-1-3-endoglucanase from Barley increased yield 14.5 kg per tree (average 124% relative to control). L-Cysteine injection at 0.27 per tree increased yield+2.0 kg (average 103%). A Recovery Enzyme Mixture including β,1-3-endoglucanase, starch-degrading Amylase, and L-Cysteine increased yield 6.5 kg per tree compared to the untreated control (average 109%), and a citrus management program including injection of one or more of these components in a range of concentrations, would be expected to improve tree health and yield.

TABLE 57
Trunk injection of recovery compositions increased ‘Valencia’ fruit size and juice
quality relative to untreated trees

| | Average Fruit | |
|---|---|---|
| | Diameter (mm) | Brix:CA Ratio |
| | (Relative to | (Relative to |
| Treatment | Untreated) | Untreated) |
| Untreated | 60.13 | 11.25 |
| | — | |
| Bt.4Q7Flg22 | 60.72 | 12.11 |
| (SEQ ID NO: 226) (0.33 mg/tree) | (101%) | (+0.86) |
| Treatment 5 | | |
| B-1,3-Endoglucanase | 62.76 | 12.01 |
| from Barley (SEQ ID NO: 731) (660 U/tree) | (104%) | (+0.76) |
| Treatment 1 | | |
| L-Cysteine | 62.52 | 12.76 |
| (0.27 mg/tree) | (104%) | (+1.51) |
| Recovery Enzyme Mixture | 65.57 | 12.89 |
| B-1,3-Endoglucanase Hordeum vulgare (SEQ ID NO: 731) | (109%) | (+1.63) |
| (660 U/tree) +Amylase from Bacillus licheniformis (SEQ ID | | |
| NO: 735) (660 U/tree) + Cysteine (0.27 mg/tree) | | |

[0829] Fruit quality assessments of the ‘Valencia’ oranges harvested in Spring 2019 indicate that trunk injection of Bt.4Q7Flg22 (0.33 mg per tree), the callose-degrading enzyme β,1-3-endoglucanase from Barley, L-cysteine, an essential amino acid for sustained defense responses, and the Recovery Enzyme Mixture increased both fruit size and ^{o}Brix_{c} to Citric Acid ratio (Brix:CA) relative to the untreated control (Table 57). According to the Food and Agriculture Organization of the United Nations (FAO), Brix:CA should be 10-14, with an ideal target of 12 for oranges. Trunk injection of Bt.4Q7Flg22, β,1-3-endoglucanase from Barley, L-cysteine, and the Recovery Enzyme Mixture all resulted a Brix:CA ratio near the target value for fruit quality.

### Examples: 20-24

[0830] In Examples 20-24, a series of treatment compositions were tested by citrus tree injection or foliar spray to measure their effect on fruit yield and quality. For ease of reference, the compositions used and application method and use rate are summarized in Table 58 below.

TABLE 58
Compositions for the prevention and treatment of citrus disease

| Composition | | Treatment | Application | # of Applications |
|---|---|---|---|---|
| No: | Formulation | Method | Use Rate | (Timing) |
| Citrus | Bt.4Q7Flg22 (SEQ ID | Trunk | 6.875 mL/tree | 1 Application |
| Composition | NO: 226) 48 ppm | Injection | (0.33 mg) | (Spring 2019) |
| 25 | 4 mM Sodium Phosphate | | | |
| | Buffer, pH 5.7 | | | |
| Citrus | Part A | Trunk | 6.875 mL/tree | 1 Application |
| Composition | Bt.4Q7Flg22 (SEQ ID | Injection | (0.33 mg) | (Spring 2019) |
| 26 | NO: 226) 48 ppm | | | |
| | 4 mM Sodium Phosphate | | | |
| | Buffer, pH 5.7 | | | |
| | Part B | Trunk | 2640 Enzyme | |
| | β-1,3-endoglucanase from | Injection | Units per tree | |
| | Hordeum vulgare (SEQ | | | |
| | ID NO: 731) | | | |
| Citrus | Amylase (amyE) | Trunk | 92 Enzyme Units | 1 Application |
| Composition | from Bacillus subtilis 168 | Injection | per tree | (Spring 2019) |
| 27 | (SEQ ID NO: 734) | | | |
| Citrus | Part A | Trunk | 92 Enzyme Units | 1 Application |
| Composition | Amylase (amyE) | Injection | per tree | (Spring 2019) |
| 28 | from Bacillus subtilis 168 | | | |
| | (SEQ ID | NO: 734) | | |
| | Part B | Trunk | 1.0 mL/tree | |
| | 2-Deoxy-D-Glucose (2- | Injection | (111.1 mg per | |
| | DDG) (111.1 mg/mL | | tree) | |
| | solution in water) | | | |
| Citrus | Part A | Trunk | 1.0 mL/tree | 1 Application |
| Composition | 2-Deoxy-D-Glucose (2- | Injection | (111.1 mg per | (Spring 2019) |
| 29 | DDG) (111.1 mg/mL | | tree) | |
| | solution in water) | | | |
| | Part B | Trunk | 9.3 mL/tree | |
| | Oxytetracycline-HCl | Injection | (0.875 g per | |
| | (94.5 mg/mL solution in | | tree) | |
| | water) | | | |
| Citrus | Bt.4Q7Flg22 (SEQ ID | Foliar | 12.0 mL/tree | 1 Application |
| Composition | NO: 226) 120 ppm | Spray | (1.44 mg) | (Spring 2019) |
| 30 | 10 mM Sodium | | | |
| | Phosphate Buffer, pH 5.7 | | | |
| Citrus | Part A | Foliar | 12.0 mL/tree | 2 Applications |
| Composition | Bt.4Q7Flg22 (SEQ ID | Spray | (1.44 mg) | (Spring 2019 |
| 31 | NO: 226) 120 ppm | | | and Fall 2019) |
| | 10 mM Sodium | | | |
| | Phosphate Buffer, pH 5.7 | | | |
| | Part B “Osmoprotectant | Foliar | 4.21 mL/tree | |
| | 1” | Spray | | |
| | 12.8 g/L Betaine HCl + | | | |
| | 3.3% (w/v) tribasic | | | |
| | potassium phosphate | | | |
| Citrus | Gm.RHPP (SEQ ID NO: | Foliar | 3.0 mL/tree (1.5 | 1 Application |
| Composition | 604) | Spray | mg) | (Spring 2019) |
| 32 | 500 ppm in water | | | |
| Citrus | β-1,3-endoglucanase | Trunk | 2625 Enzyme | 1 Application |
| Composition | (DK-1) | Injection | Units | (Fall 2019) |
| 33 | from Cellulosimicrobium | | per tree | |
| | cellulans (SEQ ID NO: | | | |
| | 760) | | | |

[0831] For Examples 20-24, trees were treated at three separate sites in Florida that were selected due to a high prevalence of HLB (See Examples 1, 2, 3). Five-year-old Ruby Red Grapefruit trees (Citrus paradisi) and 5-year old Hamlin orange (Citrus sinesis) trees were treated at Lake Wales, Fla. (Polk County), and 10-year old Valencia orange trees were treated at Eustis, Fla. (Lake County). Citrus composition treatments were applied as listed in Table 58 using a low-pressure injection device, BRANDT ENTREE for trunk injection with methods as described in Example 1, or a CO₂-pressurized backpack sprayer that produced a fine mist for foliar spray. Foliar compositions diluted in water with a non-ionic surfactant (alkyl phenol ethoxylate; 0.1% v/v of spray tank volume) and evenly applied to the canopy of the tree at a spray rate of 3 Liters (L) per tree. Blocks of trees receiving a foliar treatment were spaced in the trial area with a gap or a skipped tree between treatment blocks to avoid drift of treatment into neighboring treatment blocks. Treatments were applied during a period of low wind (<5 mph), and conditions were such all spray treatments dried on leaves within a period of 4 hours. Combination treatments described in Table 58 with two parts (A & B) were either co-injected in the same BRANDT ENTREE pouch (Citrus Compositions 26, 28, or 29) or tank mixed into the same foliar treatment tank (Citrus Composition 31). For all treatments, 10 trees were used per treatment per site, separated into two replicated blocks of five trees each.

[0832] To assess the effects of Citrus Compositions 25-33 on CLas bacterial titer, leaf samples were collected prior to application (TO) and 8-weeks post-application (T8) and processed for quantitative PCR (qPCR) at Southern Gardens Citrus (Clewiston, Fla.). For qPCR analysis, 10 leaves were collected per tree, randomly distributed over the tree canopy from the most recently hardened-off flush. Leaf mid-ribs were isolated from each set of 10 leaves and combined into a single sample for DNA extraction and qPCR analysis as described in previously in paragraph [0567] (Methods for quantifying CLas Titer in an Infected Citrus Plant). Ct values for each tree sample were used to calculate the CLas titer per 100 mg of leaf tissue. CLas titer results are summarized in Tables 60, 65 and 70. Leaf samples were again collected in August 2019 at either 15 weeks (T15; Valencia oranges) or 18 weeks (T18; Hamlin oranges and Ruby Red Grapefruit) post-application for nutrient content analysis at the University of Florida Institute of Food and Agriculture Sciences (UF IFAS) Extension (Gainesville, Fla.). Two samples were analyzed per treatment at each site, with a single sample consisting of 20 leaves randomly selected from each treatment block (5 trees per block×4 leaves per tree=20 leaves). A full nutrient panel was reported by UF IFAS Extension, including nitrogen, phosphorus, potassium, iron, calcium, copper, manganese, magnesium, boron and zinc. Selected average nutrient contents at each site (N=2 tree blocks per treatment) are reported in Tables 61, 64, 66, 71, and 72.

[0833] To assess fruit yield and quality, Hamlin oranges and Ruby Red Grapefruit (Polk County, FL) were harvested 7.5 months post-treatment. All fruit with a diameter greater than or equal to 1.6 inches (40 mm) were hand-picked and collected for each tree. The total “Fruit Weight” (in kilograms) per individual tree was measured and recorded. Trees with total fruit weights less than or greater than 2 standard deviations (2STDEV) from the trial mean were considered to be outliers and removed from the dataset. Fruit size was assessed as the “Average Weight per Fruit” in grams (weight of 20 random fruit per tree, divided by 20) and “Average Fruit Diameter” in millimeters, as described in Example 1. The “Average Fruit Count” per tree was assessed as the total “Fruit Weight” divided by “Average Weight per Fruit”. “Fruit Drop” was assessed as for Example 1. Fruit quality was assessed as for Example 2, with the exception that one set of fruit consisted for 15 total fruit, each corresponding to a sampling of 3 fruit from 5 trees of the same experimental treatment block. Each set of 15 fruit were weighed (gram; g) and then juiced together. Average yield, % fruit drop, fruit size, and juice quality for each of the tested compositions are described in Examples 20-24.

### Examples 20: Trunk Injection of Oxytetracycline and 2-Deoxy-D-Glucose Increases Fruit Yield in ‘Ruby Red’ Grapefruit and ‘Hamlin’ Orange

[0834] Harvest results from replicated Ruby Red grapefruit and Hamlin orange trials (Table 59) indicate that trunk injection of Oxytetracycline-HCl and 2-Deoxy-D-Glucose (2-DDG) together increased yield by 8.5% (kg fresh fruit) on average in comparison to the untreated control. Together with yield results in Example 16 (Table 49) for Citrus Composition 24, co-injection of Oxytetracycline-HCl and 2-DDG resulted in an average increase in yield of 14% over 4 independent trials (Table 49: 13% increase yield in ‘Vernia’ orange and a 27% increase yield in Valencia orange; Table 59: 8% in Ruby Red′ grapefruit and 9% and in ‘Hamlin’ orange).

TABLE 59
Trunk Injection of Oxytetracycline and 2-Deoxy-D-Glucose
increased fresh fruit yield in citrus

| | Yield, Average kg fruit per tree | | |
|---|---|---|---|
| | (relative to control) | | |
| Treatment | ‘Ruby Red’ Grapefruit | ‘Hamlin’ Orange | Average |
| Untreated Control | 32.57 kg | 49.4 kg | — |
| Citrus Composition 29 | 35.20 kg | 53.8 kg | |
| 2-Deoxy-D-Glucose (111.1 | (+8%) | (+9%) | (+8.5%) |
| mg/tree) + | | | |
| Oxytetracycline-HCl | | | |
| (0.875 g/tree) | | | |

### Examples 21: Trunk Injection of Bt.4Q7Flg22+β1,3 Endoglucanase Reduces Bacterial Titer, Improves Nutrient Content, and Increases Yield in Citrus

[0835] qPCR results from replicated ‘Valencia’ orange trials (Table 60) indicate that injection treatments to activate the plant immune system and degrade polysaccharides in and around sieve tube elements lead to decreased CLas bacterial titer levels 26 weeks after application. The Bt.4Q7Flg22 injection at 0.33 mg per tree decreased bacterial titers 20% relative to the untreated control, while the combination including Bt.4Q7Flg22 injection together with the callose-degrading enzyme β,1-3-endoglucanase from Barley decreased bacterial titers 97% relative to untreated control.

TABLE 60
Trunk injection of Bt.4Q7Flg22 and β-1,3-Endoglucanase decreased CLas
bacterial titers in HLB-infected ‘Ruby Red’ grapefruit 26 weeks post-application

| | Average CLas Titer | | |
|---|---|---|---|
| | (copy number per 100 mg leaf tissue) | | Fold Change in |
| | Pre-application | 26 Weeks Post- | CLas Titer |
| Treatment | T₀ | Application (T26) | (T₂₆/T₀) |
| Untreated Control | 6.23 × 10⁶ | 7.13 × 10⁶ | 1.14× |
| Citrus Composition 25 | 2.51 × 10⁶ | 2.01 × 10⁶ | 0.80× |
| Bt.4Q7Flg22 | | | |
| (SEQ ID NO: 226) | | | |
| (0.33 mg/tree) | | | |
| Citrus Composition 26 | 3.09 × 10⁵ | 9.04 × 10³ | 0.03× |
| Bt.4Q7Flg22 | | | |
| (SEQ ID NO: 226) | | | |
| (0.33 mg/tree) + | | | |
| B-1,3-Endoglucanase | | | |
| from Barley (SEQ ID NO: | | | |
| 731) (2660 U/tree) | | | |

[0836] Nutrient analysis results from replicated ‘Valencia’ and ‘Hamlin’ orange trials (Table 61) indicate that co-injection of Bt.4Q7Flg22 and β,1-3-endoglucanase increased manganese levels. Manganese is an important micronutrient involved in citrus tree metabolism and photosynthesis, and manganese deficiency can cause reduced yield, fruit size, and tree growth. Bt.4Q7Flg22 injection at 0.33 mg per tree increased manganese levels an average of 120% relative to untreated control, while the combination including Bt.4Q7Flg22 injection together with the callose-degrading enzyme β,1-3-endoglucanase from barley increased foliar manganese levels an average of 136% relative to untreated control.

TABLE 61
Trunk injection of recovery compositions
increased manganese levels in
manganese-deficient ‘Valencia’ and
‘Hamlin’ oranges relative to control

| | Manganese (ppm) | | |
|---|---|---|---|
| | (relative to untreated) | | |
| Treatment | ‘Valencia’ | ‘Hamlin’ | Average |
| Untreated Control | 6.32 | 14.18 | |
| | — | — | — |
| Citrus Composition 25 Bt.4Q7Flg22 | 7.54 | 17.05 | |
| (SEQ ID NO: 226) (0.33 mg/tree) | (119%) | (120%) | (120%) |
| Citrus Composition 26 Bt.4Q7Flg22 | 9.27 | 17.62 | |
| (SEQ ID NO: 226) (0.33 mg/tree) + | (147%) | (124%) | (136%) |
| β-1,3-Endoglucanase | | | |
| from Barley (SEQ ID NO: 731) | | | |
| (2660 U/tree) | | | |

[0837] Harvest results from replicated Ruby Red grapefruit trials (Table 62) indicate that trunk injection of Bt4Q7Flg22 alone in Spring 2019 increased yield by 14.4% relative to the untreated control. In a citrus disease management program including Bt4Q7Flg22 trunk injection (Spring 2019) and foliar application (Fall 2019), yield was further increased to 39.7% relative to untreated control. Trunk injection of β-1,3-Endoglucanase from C. cellulans to degrade polysaccharides in and around sieve tube elements increased yield by 22.4% relative to the untreated control. Based on synergistic reduction in CLas titers (Table 60), combination treatments between Bt4Q7Flg22 (Foliar and/or Trunk Injection) and β-1,3-Endoglucanase (Trunk Injection) are predicted to provide additive or synergistic yield increase and improvement in tree health.

TABLE 62
Trunk Injection of Bt4Q7Flg22 or β-1,3-Endoglucanase increased fresh fruit
yield in Ruby Red grapefruit trees relative to control

| | Yield, Average kg fruit per tree |
|---|---|
| Treatment | (relative to control) |
| Untreated Control | 32.57 kg |
| Citrus Composition 25 | 37.27 kg |
| Bt.4Q7Flg22 | (+14.4%) |
| (SEQ ID NO: 226) | |
| (0.33 mg/tree) | |
| Spring 2019 application | |
| Citrus Composition 25 | 45.49 kg |
| Bt.4Q7Flg22 (SEQ ID NO: 226) | (+39.7%) |
| (0.33 mg/tree) | |
| Spring 2019 application + | |
| Citrus Composition 30 | |
| Bt.4Q7Flg22 (SEQ ID NO: 226) | |
| (12 mL/tree) | |
| Fall 2019 application | |
| Citrus Composition 33 | 39.85 kg |
| β-1,3-endoglucanase (DK-1) | (+22.4%) |
| from Cellulosimicrobium cellulans | |
| (SEQ ID NO: 760) (2625 U/tree) | |
| Fall 2019 application | |

[0838] Fruit quality results from replicated Ruby Red grapefruit trials (Table 63) indicate that trunk injection of Bt.4Q7Flg22 and β-1,3-Endoglucanase from barley increases fruit size, as measured by an 11.4% increase in fruit diameter relative to control, and 5.4% increase relative to Bt.4Q7Flg22 trunk injection alone. Larger fruit provide more value to the grower, with a 40-count box of fruit for Bt.4Q7Flg22 and β-1,3-Endoglucanase co-treatment having higher value per box than the 56-count box for Bt.4Q7Flg22 alone, or 64-count box for the untreated control.

TABLE 63
Trunk Injection of Bt.4Q7Flg22, alone, or with β-1,3-Endoglucanase
improved fruit quality in Ruby Red grapefruit trees relative to control

| | Average fruit | |
|---|---|---|
| | diameter, mm | Box Count |
| Treatment | (relative to control) | (Fruit per box) |
| Untreated Control | 89.6 | 64-count |
| Citrus Composition 25 | 94.7 | 56-count |
| Bt.4Q7Flg22 | (+5.7%) | |
| (SEQ ID NO: 226) (0.33 mg/tree) | | |
| Citrus Composition 26 | 99.8 | 40-count |
| Bt.4Q7Flg22 + | (+11.4%) | |
| β-1,3-Endoglucanase from | | |
| Barley (SEQ ID NO: 731) (2660 | | |
| U/tree) | | |

### Example 22: Trunk Injection of Recovery Enzyme Compositions Improves Leaf Micronutrient Content

[0839] Nutrient analysis results from replicated ‘Ruby Red’ grapefruit and ‘Valencia’ and ‘Hamlin’ orange trials (Table 64) indicate that injection treatments to degrade polysaccharides in and around sieve tube elements and decrease the production of those polysaccharides lead to increased iron and zinc levels. Iron is an important micronutrient involved in chlorophyll production in citrus trees, and iron deficiency can cause leaf dieback, reduced yield, and reduced fruit and juice quality. Zinc is an important micronutrient involved in citrus tree metabolism, photosynthesis, and growth regulation, and zinc deficiency, a widespread nutrient deficiency in citrus, can cause reduced blossoming, fruit set, fruit size, fruit quality, and juice content. Trunk injection of starch-degrading Amylase from Bacillus subtilis 168 at 92 U per tree increased iron and zinc levels an average of 102% and 105% relative to untreated control, respectively, while the combination including Amylase injection together with 2-DDG, a callose synthase inhibitor, increased foliar iron and zinc levels an average of 122% and 126% relative to untreated control, respectively.

TABLE 64
Trunk injection of recovery compositions increased iron and zinc levels in
nutrient-deficient citrus leaves and improved citrus fruit quality relative to control

| | Iron (ppm) Content, Leaves | | | |
|---|---|---|---|---|
| | (relative to untreated) | | | |
| Treatment | ‘Ruby Red’ | ‘Valencia’ | ‘Hamlin’ | Average |
| Untreated Control | 47.52 | 45.71 | 57.64 | — |
| | — | — | — | |
| Citrus Composition 27 | 56.39 | 38.70 | 59.40 | (102%) |
| Amylase (amyE) | (119%) | (85%) | (103%) | |
| from Bacillus subtilis 168 | | | | |
| (SEQ ID NO: 734) (92 U/tree) | | | | |
| Citrus Composition 28 | 69.83 | 50.68 | 62.75 | (122%) |
| Amylase (amyE) | (147%) | (111%) | (109%) | |
| from Bacillus subtilis 168 | | | | |
| (SEQ ID NO: 734) (92 U/tree) + | | | | |
| 2-deoxy-D-glucose (2-DDG) | | | | |
| 5.6 mg/mL (111.1 mg/tree) | | | | |
| | Zinc (ppm) Content, Leaves | | | |
| | (relative to untreated) | | | |
| Treatment | ‘Ruby Red’ | ‘Valencia’ | ‘Hamlin’ | Average |
| Untreated Control | 63.4 | 10.82 | 12.87 | — |
| | — | — | — | |
| Citrus Composition 27 | 60.37 | 11.51 | 14.57 | (105%) |
| Amylase (amyE) | (95%) | (106%) | (113%) | |
| from Bacillus subtilis 168 | | | | |
| (SEQ ID NO: 734) (92 U/tree) | | | | |
| Citrus Composition 28 | 71.18 | 12.10 | 19.94 | (126%) |
| Amylase (amyE) | (112%) | (112%) | (155%) | |
| from Bacillus subtilis 168 | | | | |
| (SEQ ID NO: 734) (92 U/tree) + | | | | |
| 2-deoxy-D-glucose (2-DDG) | | | | |
| 5.6 mg/mL (111.1 mg/tree) | | | | |

| | Average fruit weight, grams | | |
|---|---|---|---|
| | (relative to untreated) | | |
| Treatment | ‘Ruby Red’ | ‘Hamlin’ | Average |
| Untreated Control | 297.3 | 155.8 | |
| Citrus Composition 27 | 299.8 | 170.6 | (+5%) |
| Amylase (amyE) | (+1%) | (+9%) | |
| from Bacillus subtilis 168 | | | |
| (SEQ ID NO: 734) (92 U/tree) | | | |
| Citrus Composition 28 | 306.1 | 215.2 | (+21%) |
| Amylase (amyE) | (+3%) | (38%) | |
| from Bacillus subtilis 168 | | | |
| (SEQ ID NO: 734) (92 U/tree) + | | | |
| 2-deoxy-D-glucose (2-DDG) | | | |
| 5.6 mg/mL (111.1 mg/tree) | | | |

[0840] Increased iron and zinc micronutrient levels in leaves sampled from trees injected with Amylase and 2-DDG were predicted to have a positive impact on the fruit quality at harvest. ‘Ruby Red’ Grapefruit and ‘Hamlin” fruit was harvested from untreated, Amylase injected, and Amylase+2-DDG injected trees. Fruit quality results (Table 64) indicate that trunk injection of treatments to degrade polysaccharides in and around sieve tube elements and decrease the production of those polysaccharides lead to increased fruit weight, as measured by an average 5% increase from application of starch-degrading Amylase from Bacillus subtilis 168 at 92 U per tree. Amylase injection together with 2-DDG, a callose synthase inhibitor, increased fruit weight an average 21% relative to control.

### Example 23: Foliar Application of Bt4Q7Flg22 and Osmoprotectants Decreases Bacterial Titer, Improves Nutrient Content, and Increases Yield in Citrus

[0841] qPCR results from replicated ‘Valencia’ orange trials (Table 65) indicate that foliar treatments to activate the plant immune system and protect the plant from abiotic stress lead to decreased CLas bacterial titers. Over the 8-week time course CLas bacterial titers in the untreated control increased 491% compared to initial levels, whereas bacterial titers in Bt.4Q7Flg22 spray treated trees were reduced 16%, compared to initial levels. A synergistic effect was observed for treatment with both Bt.4Q7Flg22+Osmoprotectant 1, for which a 90% reduction in CLas titers was observed in comparison to the initial bacterial titers. Osmoprotectant 1 (Citrus composition 31) contains Betaine, also known as trimethylglycine, which is a naturally occurring amino acid that is utilized by plants to hold osmotic pressure within cells. Foliarly applied betaine is taken up by plants through the stoma and is utilized by plants to hold an osmotic gradient to keep water inside tissues, and to minimize water vapor loss during transpiration. Osmoprotectant 1 additionally contains potassium, which is an essential micronutrient for plant growth and required for flower and fruit formation. Foliarly applied potassium is also used by the plant to help close the stoma under stressful conditions, such as drought or heat stress, and assists in the movement of nutrients throughout the plant through regulation and assistance in osmosis.

TABLE 65
Foliar application of citrus compositions including Bt4Q7Flg22 and
Osmoprotectants decreased CLas bacterial titers in HLB-infected
‘Valencia’ 8 weeks post-application relative to control

| | Average CLas Titer | | |
|---|---|---|---|
| | (copy number | | Fold |
| | per 100 mg leaf tissue) | | Change in |
| | Pre-application | 8 Weeks Post- | CLas Titer |
| Treatment | (T0) | Application (T8) | (T₈/T₀) |
| Untreated Control | 6.06 × 10⁵ | 3.58 × 10⁶ | 5.91× |
| Citrus Composition 30 | 1.85 × 10⁵ | 1.56 × 10⁵ | 0.84× |
| Bt.4Q7Flg22 | | | |
| (SEQ ID NO: 226) | | | |
| (12 mL/tree) | | | |
| Citrus Composition 31 | 1.08 × 10⁶ | 1.04 × 10⁵ | 0.10× |
| Bt.4Q7Flg22 | | | |
| (SEQ ID NO: 226) | | | |
| (12 mL/tree) + | | | |
| Osmoprotectant 1 | | | |
| (4.21 mL/tree) | | | |

[0842] Nutrient analysis results from replicated citrus trials (Table 66) indicate that foliar treatments to activate the plant immune system and protect the plant from abiotic stress lead to increased calcium levels. Calcium is an essential nutrient that has important roles in cell division, root development, plant growth, and fruit yield in citrus trees. On average, Bt.4Q7Flg22 spray at 12 mL/tree increased calcium levels 0.8% relative to control, while the combination including Bt.4Q7Flg22 spray and Osmoprotectant 1 increased foliar calcium levels 4.6% relative to control.

TABLE 66
Foliar application of citrus compositions including Bt4Q7Flg22 and
Osmoprotectant increased calcium levels in citrus trees relative to control

| | % Calcium (w/w) | | |
|---|---|---|---|
| | (relative to control) | | |
| | ‘Hamlin’ | ‘Ruby Red’ | |
| Treatment | Orange | Grapefruit | Average |
| Surfactant Control | 2.53 | 2.20 | 2.37 |
| | — | — | — |
| Citrus Composition 30 | 2.64 | 2.14 | 2.39 |
| Bt.4Q7Flg22 (SEQ ID NO: 226) | (104.3%) | (97.3%) | (100.8%) |
| (12 mL/tree) | | | |
| Citrus Composition 31 | 2.71 | 2.25 | 2.48 |
| Bt.4Q7Flg22 (SEQ ID NO: 226) | (107.1%) | (102.3% | (104.6%) |
| (12 mL/tree) + | | | |
| Osmoprotectant 1 | | | |
| (4.21 mL/tree) | | | |

[0843] Harvest results from replicated Hamlin orange and Ruby Red grapefruit trials (Table 67) indicate that foliar treatment of Bt.4Q7Flg22 and Osmoprotectants lead to increased yield per tree (kg fresh fruit). On average, co-treatment with Bt.4Q7Flg22 (12 mL/tree) and Osmoprotectant 1 increased yield by 21% relative to the control trees, and 10% relative to Bt.4Q7Flg22 (12 mL/tree) alone. Thus, combination treatments of Bt.4Q7Flg22 and Osmoprotectants are predicted to promote additive or synergistic yield increase.

TABLE 67
Foliar application of Bt.4Q7Flg22 and Osmoprotectants
increased fresh fruit yield in Hamlin orange and-Ruby
Red grapefruit trees relative to control

| | Yield, Average pounds fruit per tree | | |
|---|---|---|---|
| | (relative to control) | | |
| | Hamlin | Ruby Red | |
| Treatment | Orange | Grapefruit | Average |
| Surfactant Control | 39.31 kgs. | 50.75 kgs. | — |
| | — | — | |
| Citrus Composition 30 | 45.62 kgs. | 53.32 kgs. | (+11%) |
| Bt.4Q7Flg22 (SEQ ID NO: 226) | (+16%) | (+5%) | |
| (12 mL/tree) | | | |
| Citrus Composition 31 | 51.57 kgs. | 56.53 kgs. | (+21%) |
| Bt.4Q7Flg22 (SEQ ID NO: 226) | (+31%) | (+11%) | |
| (12 mL/tree) + | | | |
| Osmoprotectant 1 | | | |
| (4.21 mL/tree) | | | |

[0844] Fruit quality results from replicated Hamlin orange and Ruby Red grapefruit trials (Table 68) indicate that increased yield (Table 68) after foliar treatment with Bt.4Q7Flg22 and Osmoprotectant 1 is due in part to increased fruit size (diameter and weight) and fruit retention (higher fruit count harvested, reduced pre-harvest dropped fruit) in comparison to the control.

TABLE 68
Foliar application of Bt.4Q7Flg22 and Osmoprotectant improved fruit quality and
retention in Hamlin orange and Ruby Red grapefruit trees relative to control

| | Average fruit diameter, mm | | | Average fruit weight, grams | | |
|---|---|---|---|---|---|---|
| | (relative to control) | | | (relative to control) | | |
| | Hamlin | Ruby Red | | Hamlin | Ruby Red | |
| Treatment | Orange | Grapefruit | Average | Orange | Grapefruit | Average |
| Surfactant | 66.4 | 91.3 | — | 144.5 | 329.0 | — |
| Control | | | | | | |
| Citrus | 69.0 | 95.6 | | 166.1 | 341.0 | |
| Composition | | | | | | |
| 31 | | | | | | |
| Bt.4Q7Flg22 | (+3.9%) | (+4.7%) | (+4.3%) | (+14.9%) | (+3.6%) | (+9.3%) |
| (SEQ ID NO: | | | | | | |
| 226) | | | | | | |
| (12 mL/tree) + | | | | | | |
| Osmoprotectant | | | | | | |
| 1 | | | | | | |
| (4.21 mL/tree) | | | | | | |

| | Average Fruit Count per Tree | | | Average % Fruit Drop | | |
|---|---|---|---|---|---|---|
| | (relative to control) | | | (relative to control) | | |
| | Hamlin | Ruby Red | | Hamlin | Ruby Red | |
| Treatment | Orange | Grapefruit | Average | Orange | Grapefruit | Average |
| Surfactant | 271 | 151 | — | 6.0% | 11.7% | — |
| Control | | | | | | |
| Citrus | 314 | 165 | — | 4.2% | 10.4% | — |
| Composition | | | | | | |
| 31 | | | | | | |
| Bt.4Q7Flg22 | (+15.9%) | (+9.3%) | (+12.6%) | (−29.1%) | (−10.4%) | (−19.7%) |
| (SEQ ID NO: | | | | | | |
| 226) | | | | | | |
| (12 mL/tree) + | | | | | | |
| Osmoprotectant | | | | | | |
| 1 | | | | | | |
| (4.21 mL/tree) | | | | | | |

[0845] Juice quality results from replicated Hamlin orange and Ruby Red grapefruit trials (Table 69) indicate that foliar treatment of Bt.4Q7Flg22 and Osmoprotectant 1 leads to an increased average juice volume per fruit, ^{o}Brix_{c}:Citric Acid Ratio, and pounds-solids per tree. The Ratio is an indicator of good flavor and high juice quality. Per USDA standards, the ideal Ratio ranges from 15.0-20.5 for orange juice and from 7.0-16.0 for grapefruit juice. In the citrus industry, a higher Ratio is accepted to give a better flavor juice. On average compared to the control, combined foliar treatment of Bt4Q7Flg22 and Osmoprotectant 1 increases juice volume per fruit by 33%, ^{o}Brix_{c}:Citric Acid Ratio by 10%, and pounds-solids per tree by 25%.

TABLE 69
Foliar application of Bt.4Q7Flg22 and Osmoprotectant improved juice quality
and yield in ‘Ruby Red’ grapefruit trees relative to control

| | Average Juice Volume per Fruit, mL (relative to control) | | |
|---|---|---|---|
| Treatment | Hamlin orange | Ruby Red Grapefruit | Average |
| Surfactant Control | 45 mL | 110 mL | — |
| Citrus Composition 31 | 55 mL | 159.2 mL | (+33%) |
| Bt.4Q7Flg22 | (+22%) | (+45%) | |
| (SEQ ID NO: 226) | | | |
| (12 mL/tree) + | | | |
| Osmoprotectant 1 | | | |
| (4.21 mL/tree) | | | |

| | Average °Brix_{c}:Citric Acid Ratio | | | Average pounds-solids | | |
|---|---|---|---|---|---|---|
| | (relative to control) | | | per tree (relative to control) | | |
| | Hamlin | Ruby Red | | Hamlin | Ruby Red | |
| Treatment | orange | Grapefruit | Average | orange | Grapefruit | Average |
| Surfactant Control | 17.2 | 5.9 | — | 2.49 | 3.42 | — |
| Citrus Composition 31 | 17.9 | 6.9 | (+10%) | 3.13 | 4.24 | (+25%) |
| Bt.4Q7Flg22 | (+4%) | (+17%) | | (+26%) | (+24%) | |
| (SEQ ID NO: 226) | | | | | | |
| (12 mL/tree) + | | | | | | |
| Osmoprotectant 1 | | | | | | |
| (4.21 mL/tree) | | | | | | |

### Example 24: Foliar Application of GmRHPP Improves Citrus Tree Health and Yield

[0846] qPCR results from replicated Valencia orange trials (Table 70) indicate that foliar treatment of GmRHPP leads to decreased CLas bacterial titer 8-weeks post-application. Over the 8-week time course, CLas bacterial titers in untreated control trees increased 491% compared to initial levels, whereas bacterial titers in GmRHPP treated trees were reduced 17% compared to initial levels.

TABLE 70
Foliar application of GmRHPP decreased CLas bacterial titers in
HLB-infected Valencia 8 weeks post-application relative to controls

| | Average CLas Titer | | |
|---|---|---|---|
| | (copy number | | Fold |
| | per 100 mg leaf tissue) | | Change in |
| | Pre-application | 8 Weeks Post- | CLas Titer |
| Treatment | T0 | Application (T8) | (T₈/T₀) |
| Untreated Control | 6.06 × 10⁵ | 3.58 × 10⁶ | 5.91 |
| Citrus Composition 33 | 7.44 × 10⁵ | 6.17 × 10⁵ | 0.83 |
| GmRHPP (SEQ ID | | | |
| NO: 604) | | | |
| (1.5 mg/tree) (3.0 | | | |
| mL/tree) | | | |

[0847] Nutrient analysis results from replicated Valencia orange and Ruby Red grapefruit trials (Table 71) indicate that foliar treatment with GmRHPP leads to increased iron levels in the leaves. Iron is an important micronutrient required for chlorophyll production in leaves, and iron deficiency can cause citrus leaf dieback, reduced yield, and reduced fruit and juice quality. GmRHPP sprayed at a rate of 3.0 mL/tree per tree increased foliar iron levels an average of 28% relative to untreated.

TABLE 71
Foliar application of GmRHPP increased iron levels in iron-low
Valencia orange and Ruby Red grapefruit trees relative to control

| | Iron, ppm | | |
|---|---|---|---|
| | (relative to untreated) | | |
| | Valencia | Ruby Red | |
| Treatment | orange | grapefruit | Average |
| Untreated Control | 40.14 | 42.17 | 41.17 |
| | — | — | — |
| Citrus Composition 33 | 48.09 | 57.56 | 52.83 |
| GmRHPP (SEQ ID NO: 604) | (120%) | (136%) | (128%) |
| (3.0 mL/tree) | | | |

[0848] Nutrient analysis results from replicated Valencia and Hamlin orange and Ruby Red grapefruit trials (Table 72) indicate that foliar treatment of GmRHPP leads to increased boron levels in the leaves. Boron is an important micronutrient involved in citrus tree metabolism, growth, nutrient transport, flowering, fruiting, and hormone regulation. Boron deficiency, which is associated with HLB, can cause leaf chlorosis and defoliation, reduced yield, and reduced fruit size and quality. GmRHPP spray at 3.0 mL/tree per tree increased foliar boron levels an average of 12% relative to untreated across three trials.

TABLE 72
Foliar application of GmRHPP increased boron levels in Valencia orange,
Hamlin orange, and Ruby Red grapefruit trees relative to control

| | Boron, ppm | | | |
|---|---|---|---|---|
| | (relative to untreated) | | | |
| | Valencia | Hamlin | Ruby Red | |
| Treatment | orange | orange | grapefruit | Average |
| Untreated Control | 104.61 | 106.75 | 80.26 | 97.21 |
| | — | — | — | — |
| Citrus Composition 33 | 119.31 | 123.79 | 84.48 | 109.19 |
| GmRHPP (SEQ ID NO: 604) | (114%) | (116%) | (105%) | (112%) |
| (3.0 mL/tree) | | | | |

[0849] Harvest results from replicated Hamlin orange and Ruby Red grapefruit trials (Table 73) indicate that foliar treatment of GmRHPP leads to increased yield per tree (kg fresh fruit). On average, GmRHPP treated trees increases yield by 13.9% relative to the control trees treated with surfactant control alone.

TABLE 73
Foliar application of GmRHPP increased fresh fruit yield in
Hamlin orange and Ruby Red grapefruit trees relative to control

| | Yield, Average kg fruit per tree | | |
|---|---|---|---|
| | (relative to control) | | |
| | Hamlin | Ruby Red | |
| Treatment | orange | Grapefruit | Average |
| Surfactant Control | 39.31 kg | 50.75 kg | — |
| Citrus Composition 33 | 46.05 kg | 56.18 kg | (+13.9%) |
| GmRHPP (SEQ ID NO: 604) | (+17.1%) | (+10.7%) | |
| (3.0 mL/tree) | | | |

[0850] Harvest results from replicated Hamlin orange and Ruby Red grapefruit trials (Table 74) indicate that foliar treatment of GmRHPP leads to increased fruit count per tree and decreased fruit drop. On average, GmRHPP treated trees retain 19% more fruit at harvest, with an observed 22% decrease in fruit drop relative to the control trees treated with surfactant control alone.

TABLE 74
Foliar application of GmRHPP improved fruit retention in Hamlin
orange and Ruby Red grapefruit trees relative to control

| | Yield, Average fruit count | | | | | |
|---|---|---|---|---|---|---|
| | per tree | | | Fruit Drop, Average % | | |
| | (relative to control) | | | (relative to control) | | |
| | Hamlin | Ruby Red | | Hamlin | Ruby Red | |
| Treatment | orange | Grapefruit | Average | orange | Grapefruit | Average |
| Surfactant Control | 271 | 151 | — | 6.0% | 11.7% | — |
| Citrus Composition 33 | 297 | 193 | — | 5.2% | 8.2% | — |
| GmRHPP (SEQ ID NO: 604) | (+10%) | (+28%) | (+19%) | (−14%) | (−30%) | (−22%) |
| (3.0 mL/tree) | | | | | | |

[0851] Fruit quality results from replicated Hamlin orange and Ruby Red grapefruit trials (Table 75) indicate that foliar treatment of GmRHPP had no effect on fruit size and leads to increased fruit weight (density). On average, fruit harvested from GmRHPP treated trees weigh 6.2% more than fruit harvested from control trees treated with surfactant alone.

TABLE 75
Foliar application of GmRHPP improved fruit quality in
Hamlin orange trees relative to control

| | Average fruit | Average fruit |
|---|---|---|
| | diameter, mm | weight, grams |
| Treatment | (relative to control) | (relative to control) |
| Surfactant Control | 66.4 | 144.5 |
| Citrus Composition 33 | 65.9 | 153.3 |
| GmRHPP (SEQ ID NO: 604) | (−0.7%) | (+6.1%) |
| (3.0 mL/tree) | | |

[0852] Juice quality results from replicated Hamlin orange and Ruby Red grapefruit trials (Table 76) indicate that foliar treatment of GmRHPP leads to an increased ^{o}Brix_{c}:Citric Acid Ratio, and increased pounds-solids per tree. On average, juice harvested from GmRHPP treated citrus trees produce 13.5% more total sugar than control trees treated with surfactant alone.

TABLE 76
Foliar application of GmRHPP improved juice quality and yield in
Hamlin orange and Ruby Red grapefruit trees relative to control

| | Average °Brix_{c}:Citric Acid | | | Average pounds-solids | | |
|---|---|---|---|---|---|---|
| | Ratio | | | per tree | | |
| | (relative to control) | | | (relative to control) | | |
| | Hamlin | Ruby Red | | Hamlin | Ruby Red | |
| Treatment | orange | Grapefruit | Average | orange | Grapefruit | Average |
| Surfactant Control | 17.2 | 5.9 | — | 2.49 | 3.42 | — |
| Citrus Composition 33 | 17.9 | 6.9 | (+10%) | 2.97 | 3.71 | (+13.5%) |
| GmRHPP (SEQ ID NO: 604) | (+4%) | (+16%) | | (+19%) | (+8%) | |
| (3.0 mL/tree) | | | | | | |

### Example 25: Application of Chitinase and Glucanase Enzymes for Prevention of Sooty Mold (Ascomycete Fungi) Growth on Kiwifruit

[0853] β-1,3-D-glucanases (SEQ ID NO: 732 and SEQ ID NO: 772) and endochitinase (SEQ ID NO: 777) enzymes were investigated for their ability to prevent sooty mold growth on kiwifruit. The ascomycete fungus Cladosporium cladosporioides was grown on V8 agar (a sterol containing medium that allows for the growth and viewing of morphological features of the fungus) for 6 days in the dark to induce sporulation. Kiwifruit (Actinidia deliciosa) were marked to designate areas for spray treatments and inoculation with the fungus. Enzyme treatments comprising: β-1,3 endoglucanase (Paenibacillus species; SEQ ID NO: 732), β-1,3 endoglucanase (Cellulosimicrobium cellulans DK1; SEQ ID NO: 772) and endochitinase (Bacillus thuringiensis ChiC; SEQ ID NO: 767) were used in spray applications. Spray treatments were prepared with 0.1% non-ionic surfactant (alkyl phenol ethoxylate) and adjusted to final enzyme formulations consisting of 10% (v/v) or 33% (v/v) using water. The enzyme spray treatments were compared to a 0.1% non-ionic surfactant only control (same as described above with no enzyme added). For each treatment, 3 kiwifruits were placed on a paper towel and the marked areas were sprayed four times with the each of the treatments. The fruit were then allowed to dry before applying the mold spores.

[0854] A sterile cotton applicator was dipped into V8 broth and used to collect the C. cladosporioides mold spores from the agar V8 plate. Mold spores were then applied to the kiwifruit treated with the enzymes and surfactant control as described above. A volume of 40 μL of V8 broth containing the mold spores was applied to 6 marked spots on each of 3 kiwifruits. The spores were spread onto the marked sports for each fruit. Each treatment was also compared to a no mold control. For each treatment, the 3 kiwifruits were placed in a Ziplock bag with the spore spots facing upward and incubated in a growth chamber with 60% humidity, a natural light cycle, and ˜25° C. for 6 days.

[0855] After 6 days, images of each kiwifruit were taken. Each fruit was scored for darkened discoloration or obvious mold growth (fuzzy, filamentous, or spore-laden spots) within the 6 spots in comparison to the uninoculated surroundings. At the 6 designated spots on each kiwifruit, the mold growth was determined for a total of N=18 spots per treatment. In the first experiment (Table 78), β-1,3-endoglucanase (SEQ ID NO: 732) and endochitinase (SEQ ID NO: 777) were expressed as immobilized enzymes on a protein matrix. The β-1,3-endoglucanase (SEQ ID NO: 732) treatment reduced mold growth to 61%, relative to the surfactant only control, while endochitinase (SEQ ID NO: 778) reduced growth to 83% of control. The combined treatment with both the β-1,3-endoglucanase (SEQ ID NO: 732) and endochitinase (SEQ ID NO: 777) enzymes resulted in mold growth reduced to 78% of control. In the second experiment (Table 79), a β-1,3-endoglucanase (SEQ ID NO: 772) was expressed as a free enzyme and combined with endochitinase (SEQ ID NO: 777) expressed as an immobilized enzyme. In this experiment, the β-1,3-endoglucanase (SEQ ID NO: 772) applied alone reduced mold growth to 85% compared to the surfactant control treatment. The combination of β-1,3-endoglucanase (SEQ ID NO:772) free enzyme and immobilized endochitinase (SEQ ID NO: 777 reduced mold growth to 29% of control. Thus, the combination treatment of β-1,3-endoglucanase (SEQ ID NO: 772) free enzyme and immobilized endochitinase (SEQ ID NO: 777) had an overall greater benefit in reducing mold growth than treatment with the β-1,3-endoglucanase (SEQ ID NO: 760) enzyme when applied alone.

TABLE 78
Application of immobilized enzyme for
prevention of sooty mold growth on kiwifruit

| | Observed | Percent of |
|---|---|---|
| | mold growth | mold growth |
| | spots (out of 18 | relative to surfactant |
| Treatment (10% spray rate) | inoculated) | only control |
| Surfactant only control | 18 | — |
| Negative control (no mold) | 0 | 0% |
| β-1,3-endoglucanase (bglH) | 11 | 61% |
| Paenibacillus immobilized | | |
| enzyme (SEQ ID NO: 732) | | |
| Endochitinase (ChiC) Bacillus | 15 | 83% |
| thuringiensis immobilized enzyme | | |
| (SEQ ID NO: 777)) | | |
| β-1,3-endoglucanase (bglH) | 14 | 78% |
| Paenibacillus immobilized enzyme | | |
| (SEQ ID NO: 732) + | | |
| Endochitinase (ChiC) Bacillus | | |
| thuringiensis immobilized enzyme | | |
| (SEQ ID NO: 777) | | |

TABLE 79
Application of free enzymes for
prevention of sooty mold growth on kiwifruit

| | Observed | Percent of |
|---|---|---|
| | mold growth | mold growth |
| | spots (out of 18 | relative to control |
| Treatment (33% spray rate) | inoculated) | (mold only) |
| Surfactant only control | 14 | — |
| β-1,3-endoglucanase (DK-1) | 12 | 85% |
| Cellulosimicrobium cellulans | | |
| (SEQ ID NO: 772) | | |
| β-1,3-endoglucanase (DK-1) | 4 | 29% |
| Cellulosimicrobium cellulans | | |
| (SEQ ID NO: 772) + | | |
| Endochitinase (ChiC) | | |
| Bacillus thuringiensis immobilized | | |
| enzyme (SEQ ID NO: 777) | | |

### Example 26: Flg22-PSA and Serine Protease Foliar Application on Kiwi Protects Plants from Pseudomonas syringae pv. actinidiae (PSA-V)

[0856] Pseudomonas syringae pv. actinidiae (PSA) is a devastating plant pathogen causing bacterial canker of both green-flesh (Actinidiae deliciosa) and yellow-flesh (Actinidiae chinesis) kiwi plants throughout zones of kiwi production, causing severe harvest loss in New Zealand, China, and Italy. PSA-V colonizes the outer and inner surfaces of the kiwi plant, forming biofilms that promote virulence, and can spread through the xylem and phloem tissues. Disease symptoms of PSA-V on kiwi include bacterial leaf spot, bacterial canker of the trunk, red exudates, blossom rot, discoloration of twigs, and ultimately dieback of kiwi vines. The standard method of control for PSA-V currently employs frequent foliar applications of metallic copper to kiwi vines which is predicted to lead to the selection of copper-resistant form of the pathogen and loss of disease control. Novel methods of control are urgently needed. To assess the efficacy of Flg22-PSA (SEQ ID NO: 540) and Serine Protease 2 from Bacillus subtilis (SEQ ID NO: 795) for control of PSA-V, a potted kiwi disease trial was conducted in the Bay of Plenty area of Te Puka, New Zealand. Flg22-PSA (SEQ ID NO: 540) activates the kiwi innate immune system to restrict bacterial growth and symptom progression, and Serine Protease 2 (SEQ ID NO: 795) disrupts biofilm formation, thus decreasing bacterial virulence. Copper hydroxide was included in the trial as a comparative industry standard for control of PSA-V. Prior to inoculation, PSA-V symptom-free potted kiwi Actinidiae deliciosa ‘Hayward’ plants were evenly distributed between 6 treatment groups (Table 80), with 12 potted plants per group. Treatments were applied as described in Table 80, with Flg22-PSA (SEQ ID NO: 540) applications prior to inoculation with PSA-V for priming of plant defenses, and Serine Protease 2 (SEQ ID NO: 795) applications 48 hours after inoculation for prevention of PSA-V biofilm formation and breakdown of existing biofilms. All treatments were applied with a non-ionic surfactant for penetration of the leaf cuticle through the stoma.

TABLE 80
Treatments applied to potted kiwi trial

| | | Product dilution | | |
|---|---|---|---|---|
| Treat- | | for spray | | |
| ment | Foliar Formulation* | application | Timing | Inoculum |
| 1 | Uninfected (no | — | — | None |
| | PSA-V) | | | |
| 2 | Untreated | — | — | PSA-V |
| 3 | ChampION++ ™ | 0.9 g | 1 day | PSA-V |
| | (46.1% Copper | ChampION++ ™/ | before | |
| | Hydroxide; 30% | L water | inoculation | |
| | metallic copper | | with PSA- | |
| | equivalent) | | V | |
| 4 | Flg22-PSA (SEQ ID | 4 mL/L water | 1 day | PSA-V |
| | NO: 540) 100 μM; | | before | |
| | 10 mM Sodium | | inoculation | |
| | Phosphate | | with PSA- | |
| | Buffer, pH 5.7 | | V | |
| 5 | Serine Protease 2 | 20 mL/L water | Post | PSA-V |
| | [SEQ ID NO: 795] | | inoculation | |
| | Fermentation broth | | on dry | |
| | filtrate with | | plants | |
| | immobilized enzyme | | | |
| 6 | Flg22-PSA (SEQ ID | 4 mL/L water + | 1 day | PSA-V |
| | NO: 540) 100 μM; | 20 mL/L water | before | |
| | 10 mM Sodium | | inoculation | |
| | Phosphate Buffer, pH | | with PSA- | |
| | 5.7 + | | V + | |
| | Serine Protease 2 | | Post | |
| | [SEQ ID NO: 795] | | inoculation | |
| | Fermentation broth | | on dry | |
| | filtrate with | | plants | |
| | immobilized enzyme | | | |

*Foliar compositions contained 0.1% (v/v) Proxel ™ BC preservative, an aqueous dispersion of a blend of 330.7 mM 1,2-benzisothiazolin (BIT), 53.5 mM 5-chloro-2-methyl-4-isolthiazolin-3-one (CMIT), and 26.1 mM 2-methyl-4-isothiazolin-3-one (MIT). Foliar compositions were diluted to the indicated concentrations in water (g/L water or mL/L water) with 0.05% (v/v) Contact Xcel ™ (980 g/L linear alcohol ethoxylate) non-ionic surfactant. The diluted products were applied in fine droplets with a pressurized backpack sprayer to the entire canopy of each plant, until thoroughly covered.

[0857] 24-hours after the initial treatments, all plants except for the uninfected controls were sprayed with 1×10⁸ cfu/mL PSA-V inoculum using a 5 L hand-held pressurized sprayer aimed at the underside of leaves until thoroughly covered. The uninfected control was sprayed with water alone. Potted plants were then transported to Pukehina and placed in an area with overhead misting for 48 hours to mimic environmental conditions for PSA-V infection, with uninfected control plants separated from infected plants. After 48 hours, a subset of plants was then removed from the misting area and allowed to briefly dry before application of Serine Protease 2 (SEQ ID NO: 795). After the final treatments, all plants were moved to their final outdoor trial site, randomized positions in Pukehina. Average daily temperature at the trial site was 20.75° C. with a total rainfall of 277 mm over 34 days. Additionally, each plant was watered twice a day for two hours at a time by drip irrigation. Environmental conditions were favorable for progression of PSA-V disease symptoms. Plants were visually monitored throughout the trial period for PSA-V disease assessments, with the same assessor recording the % of leaf area covered in spots at 6 days after inoculation (6 DAI), 16 DAI, 23 DAI and 29 DAI. Additionally, each plant was assessed for treatment phytotoxicity effects at 29 DAI on a scale of 0-10, with 0=no leaf phytotoxicity and 10=very severe leaf phytotoxicity symptoms. The average disease scores at 6, 16, 23, and 29 DAI and phytotoxicity score at 29 DAI are reported in Tables 81 and 81 for each treatment (n=12 plants per treatment). P-values were calculated for each treatment vs. the untreated control.

TABLE 81
Flg22-PSA and Serine Protease 2 foliar applications
significantly reduce PSA-V disease symptoms in kiwi plants

| Treatment | Foliage Affected (% leaf surface area); | | | |
|---|---|---|---|---|
| group #/Foliar | p-values vs. untreated control | | | |
| Formulation | 6 DAI | 16 DAI | 23 DAI | 29 DAI |
| Treatment 1 | 0.00% | 1.66% | 7.89% | 18.14% |
| Uninfected plants | | | | |
| Treatment 2 | 15.12% | 40.36% | 54.64% | 67.82% |
| Untreated Control | | | | |
| Treatment 3 | 3.23% | 12.48% | 16.57% | 25.20% |
| ChampION++ ™ | (p < 0.001) | (p < 0.001) | (p < 0.001) | (p < 0.001) |
| Treatment 4 | 7.31% | 29.41% | 45.97% | 61.91% |
| Flg22-PSA (SEQ ID | (p < 0.001) | (p = 0.013) | (p = 0.085) | (p = 0.190) |
| NO: 540) | | | | |
| Treatment 5 | 3.28% | 20.26% | 42.76% | 64.90% |
| Serine Protease 2 | (p < 0.001) | (p < 0.001) | (p = 0.019) | (p = 512) |
| (SEQ ID NO: 795) | | | | |
| Treatment 6 | 5.85% | 20.01% | 35.51% | 53.52% |
| Flg22-PSA (SEQ ID | (p < 0.001) | (p < 0.001) | (p < 0.001) | (p = 0.002) |
| NO: 540) + | | | | |
| Serine Protease 2 | | | | |
| (SEQ ID NO: 722) | | | | |

[0858] Application of Flg22-PSA (SEQ ID NO: 540) or Serine Protease 2 (SEQ ID NO: 795) alone significantly reduced PSA-V leaf spot symptoms (P<0.1; 90% confidence interval) at 6, 16 and 23 DAI in comparison to the untreated control. Combination of Flg22-PSA pretreatment and Serine Protease 2 post-inoculum treatment further decreased the severity of leaf spot compared to either treatment alone at 16, 23 and 29 DAI and prolongs the period of significant protection to 29 DAI (35.4% less leaf spot compared to untreated control; P=0.002). In conclusion, Flg22-PSA and Serine Protease 2 can be used both as stand-alone treatments and in combination with other treatments aimed at restricting pathogen growth. While the industry standard ChampION++TM which is the currently used copper containing treatment to treat PSA causes mild leaf phytotoxicity (AVE score=1.6), no significant phytotoxicity was observed for Treatments 4-6 (Table 82).

TABLE 82
FLG22-PSA and Serine Protease 2 foliar applications do not
cause leaf phytotoxicity of kiwi plants

| | Average Phytotoxicity |
|---|---|
| | Score (0-10); |
| Treatment group #/Foliar Formulation | 29 DAI |
| Treatment 1 | 0.0 (±0.0) |
| Uninfected plants | |
| Treatment 2 | 0.0 (±0.0) |
| Untreated Control | |
| Treatment 3 | 1.6 (±0.9) |
| ChampION++ ™ | |
| Treatment 4 | 0.1 (±0.3) |
| Flg22-PSA (SEQ ID NO: 540) | |
| Treatment 5 | 0.0 (±0.0) |
| Serine Protease 2 (SEQ ID NO: 795) | |
| Treatment 6 | 0.0 (±0.0) |
| Flg22-PSA (SEQ ID NO: 540) + | |
| Serine Protease 2 (SEQ ID NO: 795) | |

[0859] In view of the above, it will be seen that the several objects of the invention are achieved and other advantageous results attained.

[0860] As various changes could be made in the above polypeptides, recombinant organisms, methods, and seeds, without departing from the scope of the invention, it is intended that all matter contained in the above description shall be interpreted as illustrative and not in a limiting sense.

1. A composition for bioactive priming of a plant or a plant part to increase growth, yield, health, longevity, productivity, and/or vigor of a plant or a plant part and/or protect the plant or the plant part from disease, and/or increase the innate immune response of the plant or the plant part and/or improve the quality of a fruit, juice obtained from a fruit, or a harvest obtained from a plant or plant part, wherein the composition comprises (A) at least one bioactive priming polypeptide and an inducer compound; or (B) at least two bioactive priming polypeptides, optionally, with an inducer compound; or (C) a callose synthase inhibitor and at least one inducer compound comprising a bacteriocide, an amino acid, a substituted or unsubstituted benzoic acid or derivative or salt thereof, a dicarboxylic acid or derivative or salt thereof, a betaine, a proline, a benzothiadiazole or any combination thereof; or (D) a bacteriocide and at least one inducer compound comprising β amino butyric acid (BABA), a betaine, a proline, a benzothiadiazole, salicylic acid, oxalic acid, or any combination thereof, wherein:
the polypeptide or polypeptides of (A) or (B) comprise:
(i) a flagellin or flagellin-associated polypeptide; or
(ii) a retro inverso flagellin or flagellin-associated polypeptide
(iii) a root hair promoting polypeptide (RHPP); or
(iv) a retro inverso root hair promoting polypeptide (RI RHPP); or
(v) a thionin or thionin-like polypeptide; or
(vi) a glucanase polypeptide; or
(vii) a serine protease polypeptide; or
(viii) an ACC deaminase (1-aminocyclopropane-1-carboxylate deaminase) polypeptide; or
(ix) an amylase; or
(x) a chitinase; or
(xi) any combination thereof;
with the provisos that:
the inducer compound comprises a callose synthase inhibitor, β-amino butyric acid (BABA), a betaine, a proline, a benzothiadiazole, salicylic acid, oxalic acid, or any combination thereof when the polypeptide of (A) comprises any polypeptide from groups (i)-(v) but not polypeptides from groups (vi) to (x); and
the inducer compound comprises a bacteriocide, an amino acid or isomer thereof, a callose synthase inhibitor, a substituted or unsubstituted benzoic acid or derivative thereof, a dicarboxylic acid or a derivative thereof, a betaine, a proline, a benzothiadiazole, or any combination thereof when the polypeptide of (A) comprises any polypeptide from the groups (vi) to (x); and
the composition comprises the inducer compound and the inducer compound comprises a callose synthase inhibitor, β-amino butyric acid (BABA), a betaine, a proline, a benzothiadiazole, salicylic acid, oxalic acid, or any combination thereof when the two or more polypeptides of (B) comprise polypeptides from the groups (i)-(v) but not polypeptides from the groups (vi) to (x).

2. An isolated peptide for bioactive priming of a plant or a plant part to increase growth, yield, health, longevity, productivity, and/or vigor of a plant or a plant part and/or decrease abiotic stress in the plant or the plant part and/or protect the plant or the plant part from disease, insects and/or nematodes, and/or increase the innate immune response of the plant or the plant part and/or change plant architecture, wherein the peptide comprises the amino acid sequence of any one of SEQ ID NOs: 732, 735, 746-755 and 757-778; or the peptide consists of the amino acid sequence of any one of SEQ ID NOs: 732, 735, 745-778.

3-6. (canceled)

7. A composition for bioactive priming of a plant or a plant part to increase growth, yield, health, longevity, productivity, and/or vigor of a plant or a plant part and/or protect the plant or the plant part from disease, and/or increase the innate immune response of the plant or the plant part and/or improve the quality of a fruit, juice obtained from a fruit, or a harvest obtained from a plant or plant part, wherein the composition comprises bixafen and at least one free polypeptide comprising:
(i) a flagellin or flagellin-associated polypeptide; or
(ii) a retro inverso flagellin or flagellin-associated polypeptide
(iii) a root hair promoting polypeptide (RHPP); or
(iv) a retro inverso root hair promoting polypeptide (RI RHPP); or
(v) a thionin or thionin-like polypeptide; or
(vi) a glucanase polypeptide; or
(vii) a serine protease polypeptide; or
(viii) an ACC deaminase (1-aminocyclopropane-1-carboxylate deaminase) polypeptide; or
(ix) an amylase; or
(x) a chitinase; or
(xi) any combination thereof;
wherein the free polypeptide is not bound to an exosporium of a Bacillus cereus family member or an intact Bacillus cereus family member spore.

8-10. (canceled)

11. A method for increasing growth, yield, health, longevity, productivity, and/or vigor of a plant or plant part and/or protecting the plant or plant part from disease and/or increasing the innate immune response of the plant or the plant part and/or increasing juice content and/or improving juice, sugar or acid content and/or improving a Brix:acid ratio of juice obtained from a plant, the method comprising applying the composition of claim 1 to a plant, plant part, or a plant growth medium in which the plant or plant part will be grown, or a rhizosphere in an area surrounding the plant or the plant part to increase growth, yield, health, longevity, productivity, and/or vigor of the plant or plant part and/or protect the plant or the plant part from disease and/or increase the innate immune response of the plant or plant part and/or increase juice content and/or improve juice, sugar or acid content and/or improve a Brix:acid ratio of juice obtained from a plant.

12-13. (canceled)

14. The composition of claim 1, wherein the composition comprises at least one flagellin or flagellin-associated polypeptide.

15. The composition of claim 14, wherein the flagellin or flagellin-associated polypeptide (a) is modified chemically on its N or C terminus, (b) is modified via crosslinking or cyclization, or (c) is from a Bacillus, a Lysinibacillus, a Paenibacillus, an Aneurinibacillus genus bacterium, or any combination thereof.

16-21. (canceled)

22. The composition of claim 14, wherein the amino acid sequence of the flagellin or flagellin-associated polypeptide comprises any one of SEQ ID NOs: 226-375, 526, 528, 530, 532, 534, 536, 538, 540, 571-587, and 589-590 or any combination thereof.

23-26. (canceled)

27. The composition of claim 14, wherein the amino acid sequence of the flagellin or flagellin-associated polypeptide comprises SEQ ID NO: 226.

28-70. (canceled)

71. The composition of claim 1, wherein the composition comprises a polypeptide further comprising a core sequence, wherein the core sequence comprises any one of SEQ ID NOs: 591-603.

72. (canceled)

73. The composition of claim 1, wherein at least one of the polypeptide of (A) or the polypeptides of (B) comprises a polypeptide that contains a chemical modification; is a variant having an amino acid insertion, deletion, inversion, repeat, duplication, extension, or substitution within the amino acid; is part of a fusion protein; or contains a protease recognition sequence.

74. The composition or method of claim 73, wherein:
(a) the chemical modification comprises acetylation, acid addition, acylation, ADP-ribosylation, aldehyde addition, alkylamide addition, amidation, amination, biotinylation, carbamate addition, chloromethyl ketone addition, covalent attachment of a nucleotide or nucleotide derivative, cross-linking, cyclization, disulfide bond formation, demethylation, ester addition, formation of covalent cross-links, formation of cysteine-cysteine disulfide bonds, formation of pyroglutamate, formylation, gamma-carboxylation, glycosylation, GPI anchor formation, hydrazide addition, hydroxyamic acid addition, hydroxylation, iodination, lipid addition, methylation, myristoylation, oxidation, PEGylation, proteolytic processing, phosphorylation, prenylation, palmitoylation, addition of a purification tag, pyroglutamyl addition, racemization, selenoylation, sulfonamide addition, sulfation, transfer-RNA mediated addition of amino acids to proteins, ubiquitination, or urea addition; and/or
(b) the chemical modification comprises an N-terminal modification or a C-terminal modification; and/or
(c) the amino acid substitution within the amino acid of the variant comprises substitution of a β-amino acid, a D-amino acid, or a non-natural amino acid.

75-77. (canceled)

78. The composition of claim 73 wherein the composition comprises the fusion protein and the fusion protein comprises an assistance peptide.

79. (canceled)

80. The composition of claim 78, wherein the assistance polypeptide comprises a signature polypeptide, and an amino acid sequence of the signature polypeptide comprises any one of SEQ ID NOs: 542-548, or any combination thereof.

81. (canceled)

82. The composition of claim 78, wherein the assistance polypeptide comprises: (a) a signal anchor sorting polypeptide, and an amino acid sequence of the signal anchor sorting polypeptide comprises any one of SEQ ID NOs: 549-562, or any combination thereof; or (b) a C-terminal secretion peptide, and an amino acid sequence of the C-terminal comprises any one of SEQ ID NOs: 563-570, or any combination thereof.

83-84. (canceled)

85. The composition of claim 1, wherein the composition comprises a polypeptide comprising an amino acid sequence having at least 70% identity to any one of SEQ ID NOs. 1-735, 745-787, and 794-797 and the composition has bioactive priming activity.

86-92. (canceled)

93. The composition of claim 1 wherein the composition comprises the polypeptide of (A) or the polypeptides of (B) and the inducer compound, wherein the inducer compound comprises a betaine, a betaine homolog, a betaine analog, a proline, a proline homolog, a proline analog, or any combination thereof.

94-98. (canceled)

99. The composition of claim 93 wherein the composition comprises a betaine, a betaine homolog or a betaine analog.

100. The composition of claim 99 wherein:
(a) the betaine comprises glycine betaine, glycine betaine aldehyde, β-alanine betaine, betaine hydrochloride, cetyl betaine, proline betaine, choline-O-sulfate betaine, cocaamidopropyl betaine, oleyl betaine, sulfobetaine, lauryl betaine, octyl betaine, caprylamidopropyl betaine, lauramidopropyl betaine, isostearamidopropyl betaine, or a combination, homolog, or analog of any thereof and/or
(b) the betaine homolog or analog comprises ectoine, choline, phosphatidylcholine, acetylcholine, cytidine disphosphate choline, dimethylethanolamine, choline chloride, choline salicylate, glycerophosphocholine, phosphocholine, a sphingomyelin, choline bitartrate, propio betaine, deanol betaine, homodeanol betaine, homoglycerol betaine, diethanol homobetaine, triethanol homobetaine, or a combination of any thereof.

101-104. (canceled)

105. The composition of claim 1, wherein the composition comprises a proline, a proline homolog or a proline analog.

106. The composition of claim 105 wherein
(a) the proline comprises L-proline, D-proline, hydroxyproline, hydroxyproline derivatives, proline betaine, or a combination, derivative, homolog, or analog of any thereof and/or
(b) the proline homolog or analog comprises α-methyl-L-proline, α-benzyl-Lproline, trans-4-hydroxy-L-proline, cis-4-hydroxy-L-proline, trans-3-hydroxy-L-proline, cis-3-hydroxy-L-proline, trans-4-amino-L-proline, 3,4-dehydro-α-proline, (2S)-aziridine-2-carboxylic acid, (2S)-azetidine-2-carboxylic acid, L-pipecolic acid, proline betaine, 4-oxo-L-proline, thiazolidine-2-carboxylic acid, (4R)-thiazolidine-4-carboxylic acid, or a combination of any thereof.

107-142. (canceled)

143. The composition of claim 1, wherein the composition further comprises a pesticide and the pesticide comprises an insecticide, a herbicide, a fungicide, a bacteriocide, a nematicide, a miticide, a biological control agent, or any combination thereof.

144-219. (canceled)

220. A seed coated with the composition of claim 1.

The application's sequence listing, which the Patent Office published only in electronic form, follows.

SEQUENCE LISTING (797 sequences)

SEQ ID NO: 1 - protein, 283 aa, Bacillus thuringiensis
MRINTNINSMRTQEYMRQNQAKMSNAMDRLSSGKRINSASDDAAGLAIATRMKAREGGLNVAGRNTQDGMSLIRTADSALNSVSNILLRMRDLANQSANGTNTKGNQASLQKEFAQLTEQIDYIAKNTQFNDQQLLGTADKKIKIQTLDTGSTNPAQIEITLNSVKSADLGLDVQIGDEGDAESTAAADPTSAKQAIDAIDAAITTVAGQRATLGATLNRFEFNANNLKSQETSMADAASQIEDADMAKEMSEMTKFKILNEAGISMLSQANQTPQMVSKLLQ

SEQ ID NO: 2 - protein, 283 aa, Bacillus thuringiensis; identical to SEQ ID NO: 1

SEQ ID NO: 3 - protein, 283 aa, Bacillus thuringiensis; identical to SEQ ID NO: 1

SEQ ID NO: 4 - protein, 283 aa, Bacillus cereus; identical to SEQ ID NO: 1

SEQ ID NO: 5 - protein, 266 aa, Bacillus thuringiensis
MRIGTNVLSMNARQSLYENEKHMNVAMEHLATGKKLNNASDNPANIAIVTRMHARASGMRVAIRNNEDAISMLRTAEAALQTVTNILQRMRDLAVQSANGTNSNKNRHSLNKEFQSLTEKIGYIGETTEFNDLSVFEGQNRPITLDDIGHTINMMKHIPPSPTQHDIKISTEQEARAAILKIEDALQSVSLHRADLGAMINRLQFNIENLNSQSMALTDAASLIEDADMAQEMSDFLKFKLLTEVALSMVSQANQIPQMVSKLLQS

SEQ ID NO: 6 - protein, 375 aa, Bacillus thuringiensis
MRINTNINSMRTQEYMRQNQAKMSNSMDRLSSGKRINNASDDAAGLAIATRMRARESGLGVAADNTQNGMSLIRTADSAMNSVSNILLRMRDIANQSANGTNTNENKSALQKEFAQLQKQITYIAENTQFNDKNLLNEDSEVKIQTLDSSKGEQQITIDLKAVTLEKLNIKDIAIGKADAADKPVTPGATVDQKDLDSVTDKIAALTETSSKADIDAIQSSLDNFKASMTPEDVKTLEDALKGFKTGQANPADAGVDAIQDALSKVKLPTATAAAPAADADKSDALAAIAAIDAALTKVADNRATLGATLNRLDFNVNNLKSQSSSMASAASQIEDADMAKEMSEMTKFKILNEAGISMLSQANQTPQMVSKLLQ

SEQ ID NO: 7 - protein, 416 aa, Bacillus thuringiensis
MTGITINLEIDFFAYYRFSICRKVNIKKWGFLNMRINTNINSMRTQEYMRQNQAKMSNAMDRLSSGKRINNASDDAAGLAIATRMRARENGLGVAANNTQDGMSLIRTADSAMNSVSNILLRMRDLANQSANGTNTDDNQKALDKEFSALKEQIDYISKNTEFNDKKLLNGENKTIAIQTLDNADTTKQININLADSSTSALQIDKLTISGKTTDTTKTETITVTDDEIKAAKTDIDEFNDAKKALADLKAETSAGKADGSTDDEIKTAVSNFTKSFEKIQKFMNDSDIKTVQTEIEKFDAAAPALDKAKGMGIAFTSAMDPKAGTITKAATRQNASDAIKSIDAALETIASNRATLGATLNRLDFNVNNLKSQSSSMAAAASQIEDADMAKEMSEMTKFKILNEAGISMLSQANV

SEQ ID NO: 8 - protein, 368 aa, Bacillus thuringiensis
MRINTNINSMRTQEYMRQNQAKMSNAMDRLSSGKRINNASDDAAGLAIATRMRARENGLGVAANNTQDGMSLIRTADSALQSVSNILLRMRDLANQSANGTNTDENKAAMEKEFGQLKDQIKYITDNTQFNDKNLLDAASGTTKSIAIQTLDSDQASTQIEIKIAGSSLAALGLDKVQIGQETVAQKDLDVLTKAMGRLAAPDADATTRDLDVQVAKDAFDKVKGFIADPAQAKAVERAFEDYTAAEAGKEEDAAKAIDAAYKKVTGLTAGTTGTVDAHNAVNKIDAALKTVADNRATLGATLNRLDFNVNNLKSQSASMASAASQIEDADMAKEMSEMTKFKILNEAGISMLSQANQTPQMVSKLLQ

SEQ ID NO: 9 - protein, 374 aa, Bacillus cereus
MRINTNINSMRTQEYMRQNQAKMSNSMDRLSSGKRINNASDDAAGLAIATRMRARESGLGVAANNTQDGMSLIRTADSAMNSVSNILLRMRDIANQSANGTNTDKNQVALQKEFGELQKQIDYIAKNTQFNDKNLLSGKAGAPDQALEINIQTLDSSDPNQQIKISLDSVSTAQLGVKDLQIGSSSITQQQLDTLDNAMKRLETASTTAAVRDQDVADAKAAFENVKGFFSEGNVDSINRAFTDFANETTNKDDKAEAIYALYNNATLITKPTPDASNPASVDPANAIKKIDQAIEKIASSRATLGATLNRLDFNVNNLKSQQSSMASAASQVEDADMAKEMSEMTKFKILNEAGISMLSQANQTPQMVSKLLQ

SEQ ID NO: 10 - protein, 266 aa, Bacillus cereus
MRIGTNVLSMNARQSFYENEKRMNVAIEHLATGKKLNHASDNPANVAIVTRMHARTSGIHVAIRNNEDAISMLRTAEAALQTVTNILQRMRDVAVQSANGTNSNKNRDSLNKEFQSLTEQIGYIDETTEFNDLSVFDRQNCPVTLDDIGHTVNVTKHIPPSPTQHDINISTEQEARAAIRKIEETLQNVSLHRADLGAMINQLQFNIENLNSQSTALTDAASRIEDADMAQEMSDFLKFKLLTEVALSMVSQANQIPQMVYKLLQS

SEQ ID NO: 11 - protein, 341 aa, Bacillus thuringiensis
MDRLSSGKRINNASDDAAGLAIATRMRARESGLGVAANNTQDGMSLIRTADSALNSVSNILLRMRDIANQSANGTNTADNQQALQKEFGQLKEQISYIADNTEFNDKTLLKADNSVKIQTLDSADTNKQISIDLKGVTLNQLGLDTVNIGSEKLSAESLNVAKATMARLVKADQNADPSTFALDVNTAKESFDKIKGFIANKTNVQNVENAFNDYAVADPADKADKADAIQAAFNTAITGLTAGTPNTSNPSSAVDSIDAALKTVASNRATLGATLNRLDFNVNNLKSQSASMASAASQIEDADMAKEMSEMTKFKILNEAGISMLSQANQTPQMVSKLLQ

SEQ ID NO: 12 - protein, 367 aa, Bacillus bombysepticus
MRINTNINSMRTQEYMRQNQAKMSNSMDRLSSGKRINNASDDAAGLAIATRMRSREGGLNVAARNTEDGMSLIRTADSALNSVSNILLRMRDLANQSASGTNTDKNQAAMQKEFDQLKEQIQYIADNTEFNDKKLLDGSNSTINIQTLDSHDKNKQITISLDSASLKNLDIKDLAIGSATINQTDLDTATNSMKRLATPATDGKVLAQDIADAKAAFNKVQSAYTPAEVDKIQDAFKAYDKLAADPASKATDIADAAKNVNTVFGTLATPTATKFDPSSAVEKIDKAIETIASSRATLGATLNRLDFNVTNLKSQENSMAASASQIEDADMAKEMSEMTKFKILNEAGISMLSQANQTPQMVSKLLQ

SEQ ID NO: 13 - protein, 400 aa, Bacillus thuringiensis
MTGITINLEIDFFAYYRFSICRKVNIKKWGFLNMRINTNINSMRTQEYMRQNQAKMSNSMDRLSSGKRINNASDDAAGLAIATRMRSREGGLNVAARNTEDGMSLIRTADSALNSVSNILLRMRDLANQSASGTNTDKNQAAMQKEFDQLKEQIQYIADNTEFNDKKLLDGSNSTINIQTLDSHDKNKQITISLDSASLKNLDIKDLAIGSATINQTDLDTATNSMKRLATPATDGKVLAQDIADAKAAFNKVQSAYTPAEVDKIQDAFKAYDKLAADPASKDTDIADAAKNVNTVFGTLATPTATKFDPSSAVEKIDKAIETIASSRATLGATLNRLDFNVTNLKSQENSMAASASQIEDADMAKEMSEMTKFKILNEAGISMLSQANQTPQMVSKLLQ

SEQ ID NO: 14 - protein, 367 aa, Bacillus thuringiensis
MRINTNINSMRTQEYMRQNQAKMSNSMDRLSSGKRINNASDDAAGLAIATRMRSREGGLNVAARNTEDGMSLIRTADSALNSVSNILLRMRDLANQSASGTNTDKNQAAMQKEFDQLKEQIQYIADNTEFNDKKLLDGSNSTINIQALDSHDKNKQITISLDSASLKNLDIKDLAIGSATINQTDLDTATNSMKRLATPATDGKVLAQDIADAKAAFNKVQSAYTPAEVDKIQDAFKAYDKLAADPASKDTDIADAAKNVNTVFGTLATPTATKFDPSSAVEKIDKAIETIASSRATLGATLNRLDFNVTNLKSQENSMAASASQIEDADMAKEMSEMTKFKILNEAGISMLSQANQTPQMVSKLLQ

SEQ ID NO: 15 - protein, 397 aa, Bacillus cereus
MRINTNINSMRTQEYMRQNQAKMSNAMDRLSSGKRINNASDDAAGLAIATRMRARENGLGVAANNTQDGMSLIRTADSALNSVSNILLRMRDLANQSANGTNTGDNQKALDKEFSALKEQIDYISKNTEFNDKKLLNGDNKTIAIQTLDNADTSKQININLADSSTSALKIEKLTISGSTAIAGKTEKVTITAEDIKAAEEDIKAFTQAQEGLANLVKEVKDTDGSVKTPGSTPDDIKKAVTAFTESFEKMKKFMNDEDITKVEEKIKAFDAASPDLDAAKEMGTAFTAAMKPAAGEITKAAMKPNASDAIKSIDEALETIASNRATLGATLNRLDFNVNNLKSQSSSMASAASQIEDADMAKEMSEMTKFKILNEAGISMLSQANQTPQMVSKLLQ

SEQ ID NO: 16 - protein, 266 aa, Bacillus cereus
MRIGTNVLSMNARQSLYENEKRMNVAMEHLATGKKLNNASDNPANIAIVTRMHARASGMRLAIRNNEDTISMLRTAEAALQTLTNILQRMRDLAVQSANGTNSNKNRDSLNKEFQSLTEQIGYIGETTEFNDLSVFDGQNRPVTLDDIDHTINMTKHIPPSPTQHDIKISTEQEARAAILKIEEALQSVSIHRADLGSMINRLQFNIENLNSQSMALTDAASRIEDADMAQEMSDFLKFKLLTEVALSMVSQANQIPQMVSKLLQS

SEQ ID NO: 17 - protein, 266 aa, Bacillus thuringiensis
MRIGTNVLSMNARQSLYENEKRMNVAMEHLATGKKLNHASDNPANVAIVTRMHARASGMRVAIRNNEDAISMLRTAEAALQTVTNVLQRMRDVAVQSANGTNLNKNRDSLNNEFQSLTEQIGYIDETTAFNDLSVFDGQNRPVTLDDIGHTVNVTKHISPSPTQHDINISTEQEARAAIRKIEEALQNVSLYRADLGAMINRLQFNIENLNSQSTALTDAASRIEDADMAQEMSDFLKFKLLTEVALSMVSQANQIPQMVYKLLQS

SEQ ID NO: 18 - protein, 460 aa, Bacillus thuringiensis
MRINTNINSMRTQEYMRQNQAKMSNAMDRLSSGKRINNASDDAAGLAIATRMRARESGLNVAADNTQNGMSLIRTADSAMNSVSNILLRMRDIANQSANGTNTDSNKSALQKEFAELQKQITYIADNTQFNDKNLLKEDSEVKIQTLDSSKGEQQIGIDLKAVTLEKLGINNISIGKADGTTEGTKADLTALQAAAKKLEKPDTGTMEKDVKDAKEEFDKVKASLSDEDVKKIEAAFGEFDKDKTNTTKASDIFNAIKDVKLADKAAAAPAPADLTKFKAALDKLQTPNAGTMVDDVKDAKDEFEKIKGSLSDADAQKIQAAFEEFEKANTDDSKASAIYNLAKDVKVNATDTTTGTDKDTTTSTDKDAALAAIAAIDAALTKVADNRATLGATLNRLDFNVNNLKSQSSSMASAASQIEDADMAKEMSEMTKFKILNEAGISMLSQANQTPQMVSKLLQ

SEQ ID NO: 19 - protein, 367 aa, Bacillus cereus
MRINTNINSMRTQEYMRQNQAKMSNAMDRLSSGKRINNASDDAAGLAIATRMRARESGLGVAANNTQDGMSLIRTADSALNSVSNILLRMRDLANQSANGTNTAENKAAMQKEFGELKDQIKYISENTQFNDQHLLNAAKGSTNEIAIQTLDSDSSSKQIKITLQGASLDSLDIKDLQIGSGSTVSQTDLDVLDATMTRVKTATGATRDVDVQAAKSAFDKVKGLMTKPAEVKAIERAFEDYNAGKTDALATAIEAAYTANKTGLPAPAAAAGTVDALGAITKIDAALKTVADNRATLGATLNRLDFNVNNLKSQSASMASAASQIEDADMAKEMSEMTKFKILNEAGISMLSQANQTPQMVSKLLQ

SEQ ID NO: 20 - protein, 377 aa, Bacillus thuringiensis
MRINTNINSMRTQEYMRQNQAKMSNAMDRLSSGKRINNASDDAAGLAIATRMRARESGLGVAANNTQDGMSLIRTADSALNSVSNILLRMRDIANQSANGTNTSDNQKALDKEFSALKEQIDYISKNTEFNDKKLLNGDNKSIAIQTLDNADTTKQININLADSSTTALNIDKLSIEGTGNKTITLTAADIAKDKANIDAVGTAKTALAGLTGTPAAAAINSAVADFKTAFAKADKNLMSDAQIKAVTDAITAFEADATPDLTKAKAIGTAYTAPAAGDITKASPNASEAIKSIDAALDTIASNRATLGATLNRLDFNVNNLKSQSSSMASAASQIEDADMAKEMSEMTKFKILNEAGISMLSQANQTPQMVSKLLQ

SEQ ID NO: 21 - protein, 367 aa, Bacillus thuringiensis
MRINTNINSMRTQEYMRQNQAKMSNAMDRLSSGKRINNASDDAAGLAIATRMRARESGLGVAANNTQDGMSLIRTADSALNSVSNILLRMRDIANQSANGTNTADNQQALQKEFGQLKEQISYIADNTEFNDKTLLKADNSVKIQTLDSADTNKQISIDLKGVTLNQLGLDTVNIGSETLSAESLNVAKATMARLVKADQNADPSTFALDVNTAKESFDKIKGFITNKTNVQNVENAFNDYTVADPADKADKADAIQAAFNTAITGLTAGTPNTSNPSSAVDAIDAALKTVASNRATLGATLNRLDFNVNNLKSQSASMASAASQIEDADMAKEMSEMTKFKILNEAGISMLSQANQTPQMVSKLLQ

SEQ ID NO: 22 - protein, 266 aa, Bacillus thuringiensis
MRIGTNVLSMNARQSLYENEKRMNVAMEHFATGKKLNHASDNPANVAIVTRMHARASGMRVAIRNNEDAISMLRTAEAALQTVMNILQRMRDLAVQSANGTNSNKNRDSLNKEFQSLTEQIGYIGETTEFNDLSVFDGQNRPVTLDDIGHTVNVTKHTSPSPTKHDIKISTEQEARAAIRKIEEALQNVSLHRADFGAMINRLQFNIENLNSQSMALTDAASRIEDADMAQEMSDFLKFKLLTEVALSMVSQANQIPQMVSKLLQS

SEQ ID NO: 23 - protein, 367 aa, Bacillus thuringiensis; identical to SEQ ID NO: 21

SEQ ID NO: 24 - protein, 266 aa, Bacillus thuringiensis
MRIGTNVLSMNARQSLYENEKRMNVAMEHLATGKKLNHASDNPANIVIVTRMYARASGMRVAIRNNEDAISMLRTAEAALQTVTNILQHMRDFAIQSANGTNSNTNRDSLNKEFQSLTEPIGYIGETTEFNDLSVFDGQNRPITLDDIGHTINMTKHIPPSPTQHDIKISTEQEARAAIRKIEEALQNVSLHRADLGSMINRLQFNIENLNSQSMALIDTASQVEDADMAQEISDFLKFKLLTAVALSVVSQANQIPQIVSKLLQS

SEQ ID NO: 25 - protein, 381 aa, Bacillus thuringiensis
MRINTNINSMRTQEYMRQNQAKMSNAMDRLSSGKRINNASDDAAGLAIATRMRARESGLGVAANNTQDGMSLIRTADSAMNSVSNILLRMRDISNQSANGTNTDKNQSALDKEFAALKDQIDYISKNTEFNDQKLLDGSKKSIAIQTLDNADTNKQIDIQLSNVSTKELKLDTLSIEGSSSKTFTITADDMLAVGTANATAKAKAGTLKGLNVTTGDLTAAKTDVQDFRAAFDKVKGFMGSTEVTNIEKALTKFDGDQSLANAKAIGDALTSDLATTIAKDQTYSKNVSNASSAIASIDAALESIASNRATLGATLNRLDFNVNNLKSQSSSMASAASQIEDADMAKEMSEMTKFKILNEAGISMLSQANQTPQMVSKLLQ

SEQ ID NO: 26 - protein, 381 aa, Bacillus thuringiensis; identical to SEQ ID NO: 25

SEQ ID NO: 27 - protein, 381 aa, Bacillus thuringiensis; identical to SEQ ID NO: 25

SEQ ID NO: 28 - protein, 397 aa, Bacillus thuringiensis
MTGITINLEIDFFAYYRFSICRKVNIKKWGFLNMRINTNINSMRTQEYMRQNQAKMSNAMDRLSSGKRINNASDDAAGLAIATRMRARESGLGVAANNTQDGISLIRTADSAMNSVSNILLRMRDLANQSANGTNTNENQAALNKEFDALKEQIDYISTNTEFNDKKLLDGSNKTIAVQTLDNADTSKQININLSNVSTKELGLDTLSIGTDKVEKTVYDATTKAFADLGAKTGADKAAFDADVTAAMKEFDKVKPFMSADDVKKIETKLEDYNKANDAGAQTAAQALGKEFATLTKLETTDLKANASGAIASIDTALKNIASNRATLGATLNRLDFNVNNLKSQSSSMASAASQIEDADMAKEMSEMTKFKILNEAGISMLSQANQTPQMVSKLLQ

SEQ ID NO: 29 - protein, 397 aa, Bacillus thuringiensis
MTGITINLEIDFFAYYRFSICRKVNIKKWGFLNMRINTNINSMRTQEYMRQNQAKMSNAMDRLSSGKRINNASDDAAGLAIATRMRARESGLGVAANNTQDGISLIRTADSAMNSVSNILLRMRDLANQSANGTNTNENQAALNKEFDALKEQIDYISTNTEFNDKKLLDGSNKTIAVQTLDNADTSKQININLSNVSTKELGLSTLSIGTDKVEKTVYDATTKAFADLGAKTGTDKAAFAADVTAAMKEFDKVKPFMSADDVKKIETKLEDYNKANDAGAEAAAQALGKEFATLTKLETTDLKANASGAIASIDTALKNIASNRATLGATLNRLDFNVNNLKSQSSSMASAASQIEDADMAKEMSEMTKFKILNEAGISMLSQANQTPQMVSKLLQ

SEQ ID NO: 30 - protein, 406 aa, Bacillus weihenstephanensis
MRINTNINSMRTQEYMRQNQAKMSNAMDRLSSGKRINNASDDAAGLAIATRMRARESGLSVAANNTQDGMSLIRTADSAMNSVSNILLRMRDLSNQSANGTNTDENQQALNKEFAALKDQIDYISKNTEFNDKKLLDGSNKSIAIQTLDNADTTKQINIDLSNVSTDTLNISGLTINGKKDITVTISDKDIANAATDIGKATSAQQGLADLTDTTPAVPDTPAVIGTGTAGNPQFPAVKGTPEIPGSSPAEIAKAVDDFKQAFNKVKGLMSDSAVSAMEQKFATFEKDKSLANAKDIGTAFSAPIAGNITKGEQNASGAIKSIDAALEKIASNRATLGATLNRLDFNVNNLKSQSSSMASAASQIEDADMAKEMSEMTKFKILNEAGISMLSQANQTPQMVSKLLQ

SEQ ID NO: 31 - protein, 406 aa, Bacillus thuringiensis
MTGITINLEIDFFAYYRFSICRKVNIKKWGFLNMRINTNINSMRTQEYMRQNQAKMSNAMDRLSSGKRINNASDDAAGLAIATRMRARESGLGVAANNTQDGMSLIRTADSALNSVSNILLRMRDIANQSANGTNTGDNQKALDKEFSALKEQIDYISKNTEFNDKKLLNGDNKSIAIQTLDNADTAKQININLADSSTKALNIDTLSIAGTTDKTITITAKDLTDNKTTLDALKTAKDDLAKLDDKSDQATIDKAVDAFKTAFNNVDKNLLSDKAIEGITEKMTAFDGTHTAAAAIGAAYTEPTAADIKKSAPNASGAIKSIDAALETIASNRATLGATLNRLDFNVNNLKSQSSSMASAASQIEDADMAKEMSEMTKFKILNEAGISMLSQANQTPQMVSKLLQ

SEQ ID NO: 32 - protein, 266 aa, Bacillus thuringiensis
MRIGTNVLSMNARQSLYENEKRMNVAMEHLATGKKLNHASDNPANVAIVTRMHARASGMRVAIRNNEDALSMLRTAEATLQTVANILQRMRDLAVQSSNDTNSNKNRDSLNKEFQSLTEQISYIGETTEFNDLSVFDGQNRPVTLDDIGHTVNVTKHISPSPTQHDIKISTEQEARAAIRKIEEALQNVLLHRADLGAMINRLQFNIENLNSQSMALTDAASRIEDADMAQEMSDFLKFKLLSEVALSMVSQANQIPQMVSELLQS

SEQ ID NO: 33 - protein, 393 aa, Bacillus thuringiensis
MRINTNINSMRTQEYMRQNQTKMSNAMDRLSSGKRINNASDDAAGLAIATRMRARENGLGVAANNTQDGMSLIRTADSAMNSVSNILLRMRDLANQSANGTNTDDNQKALDKEFSALKEQIDYISKNTEFNDKKLLNGENKTIAIQTLDNADTTKQININLADSSTSALQIDKLTISGKTTDTTKTQTITVTDDEIKAAKTDIDEFNDAKKALADLKAESAPSKGDGSSDDEIKEAVSNFKKSFEKIQKFMNDSDIKTVQTEIEKFDAAAPALDKAKGMGIAFTSAMDPKAGTITKAATRQNASDAIKSIDAALETIASNRATLGATLNRLDFNVNNLKSQSSSMAAAASQIEDADMAKEMSEMTKFKILNEAGISMLSQANQTPQMVSKLLQ

SEQ ID NO: 34 - protein, 426 aa, Bacillus thuringiensis
MTGITINLEIDFFAYYRFSICRKVNIKKWGFLIMRINTNINSMRTQEYMRQNQTKMSNAMDRLSSGKRINNASDDAAGLAIATRMRARENGLGVAANNTQDGMSLIRTADSAMNSVSNILLRMRDLANQSANGTNTDDNQKALDKEFSALKEQIDYISKNTEFNDKKLLNGENKTIAIQTLDNADTTKQININLADSSTSALQIDKLTISGKTTDTTKTQTITVTDDEIKAAKTDIDEFNDAKKALADLKAESAPSKGDGSSDDEIKEAVSNFKKSFEKIQKFMNDSDIKTVQTEIEKFDAAAPALDKAKGMGIAFTSAMDPKAGTITKAATRQNASDAIKSIDAALETIASNRATLGATLNRLDFNVNNLKSQSSSMAAAASQIEDADMAKEMSEMTKFKILNEAGISMLSQANQTPQMVSKLLQ

SEQ ID NO: 35 - protein, 269 aa, Bacillus thuringiensis
MSIMRIGTNVLSMNARQSLYENEKRMNVAMEHLATGKKLNHASDNPANIVIVTRMYARASGMRVAIRNNEDAISMLRTAEAALQTVTNILQHMRDFAIQSANGTNSNTNRDSLNKEFQSLTEPIGYIGETTEFNDLSVFDGQNRPITLDDIGHTINMTKHIPPSPTQHDIKISTEQEARAAIRKIEEALQNVSLHRADLGSMINRLQFNIENLNSQSMALIDTASQVEDADMAQEISDFLKFKLLTAVALSVVSQANQIPQIVSKLLQS

SEQ ID NO: 36 - protein, 414 aa, Bacillus thuringiensis
MARITINLEIDFFAYYRFSICRKVNIKKWGFLNMRINTNINSMRTQDYMRQNQAKMSNAMDRLSSGKRINNASDDAAGLAIATRMRARESGLGVAANNTQDGMSLIRTADSAMNSVSNILLRMRDISNQSANGTNTDKNQSALDKEFAALKDQIDYISKNTEFNDQKLLDGSKKSIAIQTLDNADTNKQIDIQLSNVSTKELKLDTLSIEGSSSKTFTITADDMLAVGTANATAKAKAGTLKGLNVTTGDLTAAKTDVQDFRAAFDKVKGFMGSTEVTNIEKALTKFDGDQSLANAKAIGDALTSDLATTIAKDQTYSKNVSNASSAIASIDAALESIASNRATLGATLNRLDFNVNNLKSQSSSMASAASQIEDADMAKEMSEMTKFKILNEAGISMLSQANQTPQMVSKLLQ

SEQ ID NO: 37 - protein, 266 aa, Bacillus cereus
MRIGTNVLSMNARQSLYENEKRMNVAMEHLATGKKLNHASNNPANVAIVTRMHARASGMRVAIRNNEDAISMLRTAEAALQTVTNVLQRMRDVAVQSANGTNSSKNRDSLNKEFQSLTEQIGYIDETTEFNDLSVFDGQNRTVTLDDIGHTVNVTKHIPPSPTQHDINISTEQEARAAIRKIEEALQNVSLHRADLGAMINRLQFNIENLNSQSTALTDAASRIEDADMAQEMSDFLKFKLLTEVALSMVSQANQIPQMVSKLLQS

SEQ ID NO: 38 - protein, 494 aa, Bacillus cereus
MRINTNINSMRTQEYMRQNQAKMSNAMDRLSSGKRINNASDDAAGLAIATRMRARESGLSVAADNTQNGMSLIRTADSAMNSVSNILLRMRDIANQSANGTNTDKNQVALQKEFAALKEQITYIADNTQFNDKNLLNGNQTINIQTLDSHDSTKQIGIDLKSATLEALGIKDLTVGAVGSTEAKNYVDAKEALAKNVAANEFIDAKKALDGNAIAKGYVEAKTAFDDAKPEVKALVSNYTDALAALAKDDTNDDLKKDVADTKALMDANTVAKTYFEAKTAHDGADQAIKDIVTTYDSKLGALDDAANKAISDFDKAKAAFDESPAAKELVKTMDDAKQAATQNNTANAYLVAKAAAELAPNDADKKAELENATKALEKDDTAKGLVKTYENAKEALNPANAMPLDAVKQIDAALKTVADNRATLGATLNRLDFNVNNLKSQSSAMAASASQIEDADMAKEMSEMTKFKILNEAGISMLSQANQTPQMVSKLLQ

SEQ ID NO: 39 - protein, 267 aa, Bacillus thuringiensis
MRIGTNFLSMNARQSLYENEKRMNVAMEHLATGKKLNHASDNPANIAIVTRMHARANGMRVAIRNNEDAISMLRTAEAALQTVMNILQRMRDLAIQSANSTNSNKNRDSLNKEFQSLTEQISYIGETTEFNDLSVFDGQNRPVTLDDIGHTVHISKSIPPPSPTQHDIKISTEQEARAAILKIEEALQSVSLHRADLGAMINRLHFNIENLNSQSMALTDAASRIEDADMAQEMSDFLKFKLLTEVALSMVSQANQIPQMVSKLLQS

SEQ ID NO: 40 - protein, 377 aa, Bacillus thuringiensis
MRINTNINSMRTQEYMRQNQTKMSNAMDRLSSGKRINNASDDAAGLAIATRMRARENGLGVAANNTQDGMSLIRTADSALNSVSNILLRMRDIANQSANGTNTSDNQKALDKEFSALKEQIDYISKNTEFNDKKLLNGDNKSIAIQTLDNADTTKQININLADSSTSALNIDKLSIEGTGNKTITLTAADIAKDKTNIDAVGTAKTALAGLTGTPAAAAINSAVADFKTAFAKADKNLMSDAQIKSVTDAITAFEADATPDLTKAKAIGTAYTAPAAGDITKASPNASEAIKSIDAALDTIASNRATLGATLNRLDFNVNNLKSQSSSMASAASQIEDADMAKEMSEMTKFKILNEAGISMLSQANQTPQMVSKLLQ

SEQ ID NO: 41 - protein, 406 aa, Bacillus thuringiensis
MTGITINLEIDFFAYYRFSICRKVNIKKWGFLNMRINTNINSMRTQEYMRQNQAKMSNAMDRLSSGKRINNASDDAAGLAIATRMRARESGLGVAANNTQDGMSLIRTADSALNSVSNILLRMRDIANQSANGTNTGDNQKALDKEFSALKEQIDYISKNTEFNDKKLLNGDNKSIAIQTLDNADTAKQININLADSSTKALNIDTLSIAGTTDKTITITAKDLTDNKATLDALKTAKADLAKLDDKSDQATIDKAVDAFKTAFNNVDKNLLSDKAIEGITDKMTAFDGTHTAAAAIGTAYTEPTAGDITKSAPNASGAIKSIDAALETIASNRATLGATLNRLDFNVNNLKSQSSSMASAASQIEDADMAKEMSEMTKFKILNEAGISMLSQANQTPQMVSKLLQ

SEQ ID NO: 42 - protein, 373 aa, Bacillus thuringiensis
MRINTNINSMRTQEYMRQNQAKMSNAMDRLSSGKRINNASDDAAGLAIATRMRARESGLGVAANNTQDGMSLIRTADSALNSVSNILLRMRDIANQSANGTNTGDNQKALDKEFSALKEQIDYISKNTEFNDKKLLNGDNKSIAIQTLDNADTAKQININLADSSTKALNIDTLSIAGTTDKTITITAKDLTDNKATLDALKTAKADLAKLDDKSDQATIDKAVDAFKTAFNNVDKNLLSDKAIEGITDKMTAFDGTHTAAAAIGTAYTEPTAGDITKSAPNASGAIKSIDAALETIASNRATLGATLNRLDFNVNNLKSQSSSMASAASQIEDADMAKEMSEMTKFKILNEAGISMLSQANQTPQMVSKLLQ

SEQ ID NO: 43 - protein, 361 aa, Bacillus thuringiensis
MRINTNINSMRTQEYMRQNQAKMSNAMDRLSSGKRINNASDDAAGLAIATRMRARESGLGVAANNTQDGMSLIRTADSAMNSVSNILLRMRDIANQSANGTNTNGNQAALNKEFDALKQQINYISTNTEFNDKKLLDGSNKTIAIQTLDNADTSKKIDIQLADVSTKSLNIDKLKIGGVSKETTDAVGDTFTKLSTTATTDMGALKIEVEAAMKEFDKVKGAMSAEDAKAVTDKLDAFNTAAAATNDAATIAAAKALGAAFDKTKVEMADPNASVAAIDSALENIASNRATLGATLNRLDFNVNNLKSQQSSMASAASQIEDADMAKEMSEMTKFKILNEAGISMLSQANQTPQMVSKLLQ

SEQ ID NO: 44 - protein, 465 aa, Bacillus cereus
MRINTNINSMRTQEYMRQNQAKMSNAMDRLSSGKRINNASDDAAGLAIATRMRARESGLGVAANNTQDGMALIRTADSAMNSVSNILLRMRDIANQSANGTNTDKNQAALQKEFGELQKQIDYIAGNTQFNDKNLLDGSNPSISIQTLDSADQSKQISIDLKSATLEALGIKDLTVGATENTLAKATITAKDAFDAAKDASDAAKKEIDAAAKDTPSKNDAQLAKEYIEAKATLATLKPTDATYAAKAAELDAATTALNDNAKVLVDGYEKKLTTTKTKEAEYTAAKEQSTKSTAAADLVTKYETAKSNALGNDIAKEYLEAKTAYEANKNDISSKSRFEAAETELNKDITANKAAKVLVETYEKAKTAGTTEKSLVAVDKIDEALKTIADNRATLGATLNRLDFNVNNLKSQSASMASAASQIEDADMAKEMSEMTKFKILNEAGISMLSQANQTPQMVSKLLQ

SEQ ID NO: 45 - protein, 394 aa, Bacillus thuringiensis
MTGITINLEIDFFAYYRFSICRKVNIKKWGFLIMRINTNINSMRTQEYMRQNQAKMSNAMDRLSSGKRINNASDDAAGLAIATRMRARESGLGVAANNTQDGMSLIRTADSAMNSVSNILLRMRDLANQSANGTNTNENQAALNKEFDALKEQINYISTNTEFNDKKLLDGSNKTIAIQTLDNADTSKKIDIKLADVSTESLKIDKLKIGGVSKETTDAVSETFTKLSTTKTTDKDALKAEVEAAMKEFDKVKGAMSTEDAKAVTDKLGLFNTAAAGTDDTAIATAAKNLGAAFDKTKVNMADPNASVAAIDSALENIASNRATLGATLNRLDFNVNNLKSQQSSMASAASQIEDADMAKEMSEMTKFKILNEAGISMLSQANQTPQMVSKLLQ

SEQ ID NO: 46 - protein, 266 aa, Bacillus cereus
MRIGTNVLSLNARQSLYENEKRMNVAMEHLATGKKLNNASDNPANIAIVTRMHARASSMRVAIRNNEDAISMLRTAEAALQTVTNVLQRMRDLAVQSANDTNSNKNRDSLNKEFQSLTEQIGYIDETTDFNDLSVFDGQNRTVTLDDIGHTVNVTKHIPPSPTQHDINISTEQEARAAIRKIEEALQNVSLHRADLGAMINRLQFNIENLNSQSTALTDAASRIEDADMAQEMSDFLKFKLLTEVALSMVSQANQIPQMVSKLLQS

SEQ ID NO: 47 - protein, 373 aa, Bacillus cereus
MRINTNINSMRTQEYMRQNQAKMSNAMDRLSSGKRINNASDDAAGLAIATRMRARESGLGVASNNTQDGMSLIRTADSALNSVSNILLRMRDLANQSANGTNTNENKAAMQKEFGELKEQIKYIAENTQFNDQHLLNADKGITKEIAIQTLDSDSDSKQIKIKLQGSSLEALDIKDLQIGNTELAQKDLDLLNATMDRLDATVPGTRDVDVQAAKDAFDKVKGFYTNSDSVKAIERAFEDYATASTAGTAKADAATAIKAAFDLAANKVGKPATGGAQGSANSLGAITKIDAALKTVADNRATLGATLNRLDFNVNNLKSQASSMAAAASQVEDADMAKEMSEMTKFKILNEAGISMLSQANQTPQMVSKLLQ

SEQ ID NO: 48 - protein, 447 aa, Bacillus cereus
MRINTNINSLRTQEYMRQNQAKMSNSMDRLSSGKRINNASDDAAGLAIATRMRARESGLNVAANNTQDGMSLIRTADSALGSVSNILLRMRDLANQSANGTNTSDNQAAMQKEFAELQKQITYIADNTQFNDKNLLQSNSSINIQTLDSSDGNQQIGIELKSASLKSLGIEDLAIGASVNPLAKATVEASEAYDKAKADTAAFAKSIADTAATGTGAAKADAAAVDAYIKEADPTAKGNLYTGLTADQKKLADEHNTLKAAEDGKKAELTMATTKSTADGTAKGLVDAYDNAKSDAMNDPKAKAYLEAKMAYEKDTSNVANKQKLDSTKEAMEKDPASKDLVVKLDAAKAAATNGTPLDAVSKIDAALKTVADNRATLGATLNRLDFNVNNLKSQSSSMASAASQIEDADMAKEMSEMTKFKILNEAGISMLSQANQTPQMVSKLLQ

SEQ ID NO: 49 - protein, 373 aa, Bacillus cereus; identical to SEQ ID NO: 47

SEQ ID NO: 50 - protein, 397 aa, Bacillus cereus
MDFFAYYRFSICRKVNIKKWGFFYMRINTNINSMRTQEYMRQNQAKMSNAMDRLSSGKRINNASDDAAGLAIATRMRARESGLGVASNNTQDGMSLIRTADSALNSVSNILLRMRDLANQSANGTNTNENKAAMQKEFGELKEQIKYIAENTQFNDQHLLNADKGITKEIAIQTLDSDSDSKQIKIKLQGSSLEALDIKDLQIGNTELAQKDLDLLNATMDRLDATVPGTRDVDVQAAKDAFDKVKGFYTNSDSVKAIERAFEDYATASTAGTAKADAATAIKAAFDLAANKVGKPATGGAQGSANSLGAITKIDAALKTVADNRATLGATLNRLDFNVNNLKSQASSMAAAASQVEDADMAKEMSEMTKFKILNEAGISMLSQANQTPQMVSKLLQ

SEQ ID NO: 51 - protein, 455 aa, Bacillus cereus
MRINTNINSMRTQEYMRQNQAKMSNAMDRLSSGKRINNASDDAAGLAIATRMRARESGLGVAANNTQDGMSLIRTADSALNSVSNILLRMRDIANQSANGTNTGDNQKALDKEFSALKEQIDYISKNTEFNDKKLLNGENTSIAIQTLDSADTAKQININLADSSTSALLIDKLSISGAGAGTALAGVATADINAAGTKQAALSGLTGSKTTDELDDAVKEFKTEFDKVKSGLSAENADKITAAMDKYTNNKTLDNAKAIGDLYKTMAPADSTVVGTAGTKGQALIDLNATATGDTAQKRQVAVDAFKDDFDKIKGGLNAQDAAKVTAALDKFNKADGSGNTLENAQEIGKVFAEVAAGSTKSNASDAIKSIDKALETIASNRATLGATLNRLDFNVNNLKSQSSSMASAASQIEDADMAKEMSEMTKFKILNEAGISMLSQANQTPQMVSKLLQ

SEQ ID NO: 52 - protein, 367 aa, Bacillus thuringiensis
MRINTNINSMRTQEYMRQNQTKMSNAMDRLSSGKRINNASDDAAGLAIATRMRSREGGLNVAARNTEDGMSLIRTADSALNSVSNILLRMRDLANQSASETNTSKNQAAMQKEFDQLKEQIQYIADNTEFNDKKLLDGSNSTINIQTLDSHDKNKQITISLDSASLKNLDITDLAIGSNTVNKNDLDTLNNSMKRLETAAADAAVQAQDVTDAKNAFNKVKSGYTPAEVEKMEDAFKAYDKVVADPAKTDALLKAAAEKINTEFKTLTAPTATAFDPSSSVEKIDKAIETIASSRATLGATLNRLDFNVTNLKSQENSMAASASQIEDADMAKEMSEMTKFKILNEAGISMLSQANQTPQMVSKLLQ

SEQ ID NO: 53 - protein, 367 aa, Bacillus thuringiensis; identical to SEQ ID NO: 52

SEQ ID NO: 54 - protein, 381 aa, Bacillus thuringiensis
MGVLNMRINTNINSMRTQEYMRQNQAKMSNAMDRLSSGKRINNASDDAAGLAIATRMRARENGLGVAANNTQDGMSLIRTADSALNSVSNILLRMRDIANQSANGTNTGDNQKALDKEFSALKEQIDYISKNTEFNDKKLLNGDNKSIAIQTLDNADTSKQINIDLANTSTSSLKIDKLSIEGKGNQTIAITAADIAKDTNIAALTSAQGKLAALTGTPAPAALTTAVDEFKAAFEKVDKNLMSDTQITGIENAIKAYDGATTKTLALAQAVGTAYTAPTPGDITKELPNASSSIKSIDAALETIASNRATLGATLNRLDFNVNNLKSQASSMASAASQIEDADMAKEMSEMTKFKILNEAGISMLSQANQTPQMVSKLLQ

SEQ ID NO: 55 - protein, 364 aa, Bacillus thuringiensis
MGVLNMRINTNINSMRTQEYMRQNQAKMSNAMDRLSSGKRINNASDDAAGLAIATRMRARESGLGVAANNTQDGISLIRTADSAMNSVSNILLRMRDLANQSANGTNTSENQAALDKEFGALKEQINYISTNTEFNDKKLLDGSNETIAIQTLDNADEGKKIDIKLANVSTDSLKIDKLTIGGAAQKTVDAVADKFNALKTTTTTDKAAIQTEVDAVMKEFDKVKGSMSAEDAKVITDKLKDYNDAADTDTAKATAAKDLGAAFDKTKVNIANPNAAVAAIDSALENIASNRATLGATLNRLDFNVNNLKSQSSSMASAASQIEDADMAKEMSEMTKFKILNEAGISMLSQANQTPQMVSKLLQ

SEQ ID NO: 56 - protein, 266 aa, Bacillus cereus
MRIGTNVLSMNARQSLYENEKRMNVAMEHLATGKKLNHASNNPANIAIVTRMHARASGMRVAIRNNEDALSMLRTAEAALQTVTNILQRMRDLAVQSANVTNSNKNRNSLNKEFQSLTEQISYIGETTEFNDLSVFDGQNRPVTLDDIGYTVNVTKHTPPSPTQHDIKISTEQEARAAIRKIEEALQNVSLHRADLGSMMNRLQFNIENLNSQSMALTDAASRIEDADMAQEMSDFLKFKLLTEVALSMVSQANQIPQMVSKLLQS

SEQ ID NO: 57 - protein, 460 aa, Bacillus cereus
MRINTNINSMRTQEYMRQNQAKMSTAMDRLSSGKRINNASDDAAGLAIATRMRARESGLGVAANNTQDGISLIRTADSAMNSVSNILLRMRDLANQSANGTNTDKNQGALDKEFAALKEQIDYISKNTEFNDKKLLDGSNKAIAIQTLDSDDKGKQIDISLSDTSTTALKINNLSIAANGLGIGSGKELVGVADNTIANASAEALKKLDGTTGDTDVKRSNAVKAFTDQYKDLKVAMNAKDVETIDAAIKKFEGANTLENAQAIGAAFEGAAKATLTTDINNATLTSKALSDLDTDSTTETRKAAMKDFVAAFDKVKGSMNSSDVTKISDAIDRFSKTDDSGNTLEAARAIGDAFKAATTNGKTSTATDANSAIKAIDEALETIASNRATLGATLNRLDFNVNNLKNQASSMASAASQVEDADMAKEMSEMTKFKILNEAGISMLSQANQTPQMVSKLLQ

SEQ ID NO: 58 - protein, 399 aa, Bacillus cereus
MRINTNINSMRTQEYMRQNQAKMSTAMDRLSSGKRINNASDDAAGLAIATRMRARESGLGVAANNTQDGISLIRTADSAMNSVSNILLRMRDLANQSANGTNTDKNQAALDKEFNALKEQIDYISKNTEFNDKKLLDGSNKSIAVQTLDNADTSKQININLSNTSTKALEINSLTISGTTPIAGKNETSKITAEQMTAASDALEKFKTAQEGLANLTEPTKGSDGKPEAGTGSSNEDIVKAVKAFKEAFKNIQPLMSDTDITTVQNKIDLFDEDAPDLSAAKLIGTTFEESMKPVADKEITKAAVKPNASDAIAAIDAALTKVADNRATLGATLNRLDFNVNNLKSQASSMASAASQVEDADMAKEMSEMTKFKILNEAGISMLSQANQTPQMVSKLLQ

SEQ ID NO: 59 - protein, 266 aa, Bacillus cereus
MRIGTNVLSLNARQSLYENEKRMNVAMEHLATGKKLNNASDNPANIAIVTRMHARASGMRVAIRNNEDAISMLRTAEAALQTVTNVLQRMRDLAVQSANGTNSNKNRDSLNKEFQSLTEQIGYIDETTEFNNLSVFDGQNRPVTLDDIGHTVNVTKHIPPFPTQHDINISTEQEARAAIRKIEEALQNVSLHRADLGAMINRLQFNIENLNSQSTALTDAASRIEDADMAQEMSDFLKFKLLTEVALSMVSQANQVPQMVSKLLQS

SEQ ID NO: 60 - protein, 269 aa, Bacillus thuringiensis
MRINTNINSMRTQEYMRQNQAKMSNAMDRLSSGKRINNASDDAAGLAIATRMRAHESGLSVAARNTSDGISLIRTADSALQSVSNILLRMRDIANQTANGTNKDTDIEALGKEFAALKEQITYVSDNTKFNGRELLKGGDDINIQTYDGSDESQQIKIKISELDLSSLDTGEVTDSDTARGTVSTLDDAITNIASKRAELGATLNRLDYNTQNVNSEAASMAASASQIEDADMAKEMSEMTKFKILSEAGISMLSQANQTPQMVSKLLQ

SEQ ID NO: 61 - protein, 269 aa, Bacillus cereus; identical to SEQ ID NO: 60

SEQ ID NO: 62 - protein, 267 aa, Bacillus thuringiensis; identical to SEQ ID NO: 39

SEQ ID NO: 63 - protein, 373 aa, Bacillus thuringiensis; identical to SEQ ID NO: 42

SEQ ID NO: 64 - protein, 257 aa, Bacillus aryabhattai
MRINHNITALNTYRQFNNANNAQAKSMEKLSSGQRINSASDDAAGLAISEKMRGQIRGLDQASRNAQDGVSLIQTAEGALNETHDILQRMRELVVQAGNGTNKTEDLDAIQDEIGSLIEEIGGETDSKGISDRAQFNGRNLLDGSLDITLQVGANAGQQVNLKIGDMSAGALGADTDSDGAADAFVNSINVKDFATTSFDDQLAIIDGAINQVSEQRSGLGATQNRLDHTINNLSTSSENLTASESRIRDVDYALAA

SEQ ID NO: 65 - protein, 270 aa, Bacillus manliponensis
MRINTNINSMRTQEYMRQNQDKMNTSMNRLSSGKQINSASDDAAGLAIATRMRAKEGGLNVGAKNTQDGMSALRTMDSALNSVSNILLRMRDLATQSATGTNQGNDRESLDLEFQQLTEEITHIAEKTNFNGNALLSGSGSAINVQLSDAAEDKLTIAAIDATASTLLKGAVDVKTEDKADAAITKIDQAIQDIADNRATYGSQLNRLDHNLNNVNSQATNMAAAASQIEDADMAKEMSEMTKFKILSEAGVSMLSQANQTPQMVSKLLQ

SEQ ID NO: 66 - protein, 273 aa, Lysinibacillus sp.
MRIGSWTATGMSIVNHMNRNWNAASKSMLRLSSGYRINSAADDAAGLAISEKMRGQIRGLTMASKNIMDGVSLIQTAEGALNETHAIVQRMRELAVQAATDTNTDDDRAKLDLEFQELKKEIDRISTDTEFNTRTLLNGDYKDNGLKIQVGANSGQAIEVKIGDAGLAGIGLSTESIATREGANAALGKLDEATKNVSMERSRLGAYQNRLEHAYNVAENTAINLQDAESRIRDVDIAKEMMNMVKSQILAQVGQQVLAMHMQQAQGILRLLG

SEQ ID NO: 67 - protein, 273 aa, Lysinibacillus sp.
MKIGSWTATGMSIVNHMNRNWNAASKSMLRLSSGYRINSAADDAAGLAISEKMRGQIRGLTMASKNIMDGVSLIQTAEGALNETHAIVQRMRELAVQAATDTNTDDDRAKLDLEFQELKKEIDRISTDTAFNTRTLLNGDYKDNGLKIQVGANSGQAIEVKIGDAGLAGIGLSTESIATREGANAALGKLDEATKNVSMERSRLGAYQNRLEHAYNVAENTAINLQDAESRIRDVDIAKEMMHMVKSQILAQVGQQVLAMHIQQAQGILRLLG

SEQ ID NO: 68 - protein, 418 aa, Paenibacillus sp.
MIISHNLTALNTMNKLKQKDLAVSKSLGKLSSGLRINGASDDAAGLAISEKMRGQIRGLNQASRNIQDGISLIQVADGAMQEIHSMLQRMNELAVQASNGTYSGSDRLNIQSEVEQLIEEIDEIAGNTGFNGIKLLNGNNEKTEKTEKTGSVVSVNNPPNNKLITISSPVGTSVSEILNNLLTVFNEAKNGQVGDSDSKRVSSKFTLSINNDELSIVCDTGDGFLLSGGSPNLFYQGYIGGSYKYKFTEFINENDFINIMDIGGANGGDTLKFNFSSISKEPEEQKEQKGLTLQIGANSGETLNIKLPNVTTSAIGISSIDVSTIPNAESSLSSISAAIDKVSAERARMGAYQNRLEHSRNNVVTYAENLTAAESRIRDVDMAKEMMELMKNQIFTQAGQAMLLQTNTQPQAILQLLK

SEQ ID NO: 69 - protein, 387 aa, Bacillus anthracis
MRINTNINSMRTQEYMRQNQAKMSNAMDRLSSGKRINNASDDAAGLAIATRMRARESGLGVAANNTQDGMSLIRTADSAMNSVSNILLRMRDLANQSANGTNTKENQDALDKEFGALKEQIDYISKNTEFNDKKLLNGDNKSIAIQTLDNADTAKQININLADSSTKALNIDSLTISGSKDATITITAEDITAASAEITAAKGARTALANLKDTPADPTKDPAASTPAEIKAAVDDFKGKFEKIKGLMNDTDVKAVEEKIKEFETTSTLAKAQAIGTAFTTGMEPKAGNITKNVPAASSSIKAIDSALETIASNRATLGATLNRLDFNVNNLKSQSSAMASAASQIEDADMAKEMSEMTKFKILNEAGISMLSQANQTPQMVSKLLQ

SEQ ID NO: 70 - protein, 300 aa, Bacillus anthracis
MQKSQYKKMGVLKMRINTNINSMRTQEYMRQNQDKMNVSMNRLSSGKRINSAADDAAGLAIATRMRARQSGLEKASQNTQDGMSLIRTAESAMNSVSNILTRMRDIAVQSSNGTNTAENQSALQKEFAELQEQIDYIAKNTEFNDKNLLAGTGAVTIGSTSISGAEISIETLDSSATNQQITIKLANTTAEKLGIDATTSNISISGAASALAAISALNTALNTVAGNRATLGATLNRLDRNVENLNNQATNMASAASQIEDADMAKEMSEMTKFKILNEAGISMLSQANQTPQMVSKLLQ

SEQ ID NO: 71 - protein, 287 aa, Bacillus anthracis
MRINTNINSMRTQEYMRQNQDKMNVSMNRLSSGKRINSAADDAAGLAIATRMRARQSGLEKASQNTQDGMSLIRTAESAMNSVSNILTRMRDIAVQSSNGTNTAENQSALQKEFAELQEQIDYIAKNTEFNDKNLLAGTGAVTIGSTSISGAEISIETLDSSATNQQITIKLANTTAEKLGIDATTSNISISGAASALAAISALNTALNTVAGNRATLGATLNRLDRNVENLNNQATNMASAASQIKDADKAKEMSEMTKFKILNEAGISMLSQANQTPQMVSKLLQ

SEQ ID NO: 72 - protein, 282 aa, Bacillus anthracis
MRINTNINSMRTQEYMRQNQDKMNVSMNRLSSGKRINSAADDAAGLAIATRMRARQSGLEKASQNTQDGMSLIRTAESAMNSVSNILTRMRDIAVQSSNGTNTAENQSALQKEFAELQEQIDYIAKNTEFNDKNLLAGTGAVTIGSTSISGAEISIETLDSSATNQQITIKLANTTAEKLGIDATTSNISISGAASALAAISALNTALNTVAGNRATLGATLNRLDRNVENLNNQATNMASAASQIEDADMAKEMSEMTKFKILNEAGISMLSQANQTPQMV

SEQ ID NO: 73 - protein, 265 aa, Bacillus anthracis
MNVSMNRLSSGKRINSAADDAAGLAIATRMRARQSGLEKASQNTQDGMSLIRTAESAMNSVSNILTRMRDIAVQSSNGTNTAENQSALQKEFAELQEQIDYIAKNTEFNDKNLLAGTGAVTIGSTSISGAEISIETLDSSATNQQITIKLANTTAEKLGIDATTSNISISGAASALAAISALNTALNTVAGNRATLGATLNRLDRNVENLNNQATNMASAASQIEDADMAKEMSEMTKFKILNEAGISMLSQANQTPQMVSKLLQ

SEQ ID NO: 74 - protein, 257 aa, Bacillus megaterium
MRINHNITALNTYRQFNNANNAQAKSMEKLSSGQRINSASDDAAGLAISEKMRGQIRGLDQASRNAQDGVSLIQTAEGALNETHDILQRMRELVVQAGNGTNKTEDLDAIQDEIGSLIEEIGGEADSKGISDRAQFNGRNLLDGSLDITLQVGANAGQQVNLKIGDMSAGALGADTNSDGAADAFVNSINVKDFTATSFDDQLAIIDGAINQVSEQRSGLGATQNRLDHTINNLSTSSENLTASESRIRDVDYALAA

SEQ ID NO: 75 - protein, 286 aa, Aneurinibacillus sp.
MRINHNLPALNAYRNLAQNQIGTSKILERLSSGYRINRASDDAAGLAISEKMRGQIRGLEQGQRNTMDGVSLIQTAEGALQEIHEMLQRMRELAVQAANGTYSDKDKKAIEDEINQLTAQIDQIAKTTEFNGIQLIGDSDSTSLQDVKIQYGPKKEDSLTLELTTQPEADPPFAAGCKADKASLKIDNVDVISDPEGAIETFKAAIDQVSRIRSYFGAIQNRLEHVVNNLSNYTENLTGAESRIRDADMAKEMTEFTRFNIINQSATAMLAQANQLPQGVLQLLKG

SEQ ID NO: 76 - protein, 152 aa, Bacillus thuringiensis
GFLNMRINTNINSMRTQEYMRQNQAKMSNAMDRLSSGKRINSASDDAAGLAIATRMKAREGGLNVAGRNTQDGMSLIRTADSALNSVSNILLRMRDLANQSANGTNTKGNQASLQKEFAQLTEQIDYIAKNTQFNDQQLLGTADKKIKIQTL

SEQ ID NO: 77 - protein, 84 aa, Bacillus thuringiensis
IDAAITTVAGQRATLGATLNRFEFNANNLKSQETSMADAASQIEDADMAKEMSEMTKFKILNEAGISMLSQANQTPQMVSKLLQ

SEQ ID NO: 78 - protein, 151 aa, Bacillus thuringiensis
GFLNMRINTNINSMRTQEYMRQNQAKMSNAMDRLSSGKRINSASDDAAGLAIATRMKAREGGLNVAGRNTQDGMSLIRTADSALNSVSNILLRMRDLANQSANGTNTKGNQASLQKEFAQLTEQIDYIAKNTQFNDQQLLGTADKKIKIQT

SEQ ID NO: 79 - protein, 84 aa, Bacillus thuringiensis; identical to SEQ ID NO: 77

SEQ ID NO: 80 - protein, 152 aa, Bacillus thuringiensis; identical to SEQ ID NO: 76

SEQ ID NO: 81 - protein, 84 aa, Bacillus thuringiensis; identical to SEQ ID NO: 77

SEQ ID NO: 82 - protein, 152 aa, Bacillus cereus; identical to SEQ ID NO: 76

SEQ ID NO: 83 - protein, 84 aa, Bacillus cereus; identical to SEQ ID NO: 77

SEQ ID NO: 84 - protein, 151 aa, Bacillus thuringiensis
GFLNMRINTNINSMRTQEYMRQNQAKMSNSMDRLSSGKRINSAADDAAGLAIATRMKAREGGLNVAARNTQDGMSLIRTADSALNSVSNILLRMRDLANQSATGTNTTKNQVALNKEFAALKEQITYIADNTQFNDKNLLKSTQEIKIQTL

SEQ ID NO: 85 - protein, 85 aa, Bacillus thuringiensis
QLDAALTKVADNRATLGATLNRLDFNVNNLKSQENSMAASASQIEDADMAKEMSEMTKFKILNEAGISMLSQANQTPQMVSKLLQ

SEQ ID NO: 86 - protein, 154 aa, Bacillus thuringiensis
WGFLIMRINTNINSMRTQEYMRQNQAKMSNSMDRLSSGKRINNASDDAAGLAIATRMRARESGLGVAADNTQNGMSLIRTADSAMNSVSNILLRMRDIANQSANGTNTNENKSALQKEFAQLQKQITYIAENTQFNDKNLLNEDSEVKIQTLDS

SEQ ID NO: 87 - protein, 88 aa, Bacillus thuringiensis
AIAAIDAALTKVADNRATLGATLNRLDFNVNNLKSQSSSMASAASQIEDADMAKEMSEMTKFKILNEAGISMLSQANQTPQMVSKLLQ

SEQ ID NO: 88 - protein, 140 aa, Bacillus thuringiensis
GFLNMRINTNINSMRTQEYMRQNQAKMSNAMDRLSSGKRINNASDDAAGLAIATRMRARENGLGVAANNTQDGMSLIRTADSAMNSVSNILLRMRDLANQSANGTNTDDNQKALDKEFSALKEQIDYISKNTEFNDKKLL

SEQ ID NO: 89 - protein, 62 aa, Bacillus thuringiensis
RATLGATLNRLDFNVNNLKSQSSSMAAAASQIEDADMAKEMSEMTKFKILNEAGISMLSQAN

SEQ ID NO: 90 - protein, 142 aa, Bacillus thuringiensis
GFLNMRINTNINSMRTQEYMRQNQAKMSNAMDRLSSGKRINNASDDAAGLAIATRMRARENGLGVAANNTQDGMSLIRTADSALQSVSNILLRMRDLANQSANGTNTDENKAAMEKEFGQLKDQIKYITDNTQFNDKNLLDA

SEQ ID NO: 91 - protein, 84 aa, Bacillus thuringiensis
IDAALKTVADNRATLGATLNRLDFNVNNLKSQSASMASAASQIEDADMAKEMSEMTKFKILNEAGISMLSQANQTPQMVSKLLQ

SEQ ID NO: 92 - protein, 137 aa, Bacillus cereus
MGVLNMRINTNINSMRTQEYMRQNQAKMSNSMDRLSSGKRINNASDDAAGLAIATRMRARESGLGVAANNTQDGMSLIRTADSAMNSVSNILLRMRDIANQSANGTNTDKNQVALQKEFGELQKQIDYIAKNTQFND

SEQ ID NO: 93 - protein, 73 aa, Bacillus cereus
RATLGATLNRLDFNVNNLKSQQSSMASAASQVEDADMAKEMSEMTKFKILNEAGISMLSQANQTPQMVSKLLQ

SEQ ID NO: 94 - protein, 137 aa, Bacillus cereus
MGVLNMRIGTNVLSMNARQSFYENEKRMNVAIEHLATGKKLNHASDNPANVAIVTRMHARTSGIHVAIRNNEDAISMLRTAEAALQTVTNILQRMRDVAVQSANGTNSNKNRDSLNKEFQSLTEQIGYIDETTEFND

SEQ ID NO: 95 - protein, 73 aa, Bacillus cereus
RADLGAMINQLQFNIENLNSQSTALTDAASRIEDADMAQEMSDFLKFKLLTEVALSMVSQANQIPQMVYKLLQ

SEQ ID NO: 96 - protein, 140 aa, Bacillus thuringiensis
GFLNMRINTNINSMRTQEYMRQNQAKMSNAMDRLSSGKRINNASDDAAGLAIATRMRARESGLGVAANNTQDGMSLIRTADSALNSVSNILLRMRDIANQSANGTNTADNQQALQKEFGQLKEQISYIADNTEFNDKTLL

SEQ ID NO: 97 - protein, 88 aa, Bacillus thuringiensis
AVDSIDAALKTVASNRATLGATLNRLDFNVNNLKSQSASMASAASQIEDADMAKEMSEMTKFKILNEAGISMLSQANQTPQMVSKLLQ

SEQ ID NO: 98 - protein, 128 aa, Bacillus bombysepticus
GFLNMRINTNINSMRTQEYMRQNQAKMSNSMDRLSSGKRINNASDDAAGLAIATRMRSREGGLNVAARNTEDGMSLIRTADSALNSVSNILLRMRDLANQSASGTNTDKNQAAMQKEFDQLKEQIQYI

SEQ ID NO: 99 - protein, 70 aa, Bacillus bombysepticus
LGATLNRLDFNVTNLKSQENSMAASASQIEDADMAKEMSEMTKFKILNEAGISMLSQANQTPQMVSKLLQ

SEQ ID NO: 100 - protein, 128 aa, Bacillus thuringiensis; identical to SEQ ID NO: 98

SEQ ID NO: 101 - protein, 73 aa, Bacillus thuringiensis
RATLGATLNRLDFNVTNLKSQENSMAASASQIEDADMAKEMSEMTKFKILNEAGISMLSQANQTPQMVSKLLQ

SEQ ID NO: 102 - protein, 128 aa, Bacillus thuringiensis; identical to SEQ ID NO: 98

SEQ ID NO: 103 - protein, 73 aa, Bacillus thuringiensis; identical to SEQ ID NO: 101

SEQ ID NO: 104 - protein, 140 aa, Bacillus cereus
GFLNMRINTNINSMRTQEYMRQNQAKMSNAMDRLSSGKRINNASDDAAGLAIATRMRARENGLGVAANNTQDGMSLIRTADSALNSVSNILLRMRDLANQSANGTNTGDNQKALDKEFSALKEQIDYISKNTEFNDKKLL

SEQ ID NO: 105 - protein, 73 aa, Bacillus cereus
RATLGATLNRLDFNVNNLKSQSSSMASAASQIEDADMAKEMSEMTKFKILNEAGISMLSQANQTPQMVSKLLQ

SEQ ID NO: 106 - protein, 136 aa, Bacillus cereus
GFLNMRIGTNVLSMNARQSLYENEKRMNVAMEHLATGKKLNNASDNPANIAIVTRMHARASGMRLAIRNNEDTISMLRTAEAALQTLTNILQRMRDLAVQSANGTNSNKNRDSLNKEFQSLTEQIGYIGETTEFND

SEQ ID NO: 107 - protein, 73 aa, Bacillus cereus
RADLGSMINRLQFNIENLNSQSMALTDAASRIEDADMAQEMSDFLKFKLLTEVALSMVSQANQIPQMVSKLLQ

SEQ ID NO: 108 - protein, 153 aa, Bacillus thuringiensis
GVLNMRINTNINSMRTQEYMRQNQAKMSNAMDRLSSGKRINNASDDAAGLAIATRMRARESGLNVAADNTQNGMSLIRTADSAMNSVSNILLRMRDIANQSANGTNTDSNKSALQKEFAELQKQITYIADNTQFNDKNLLKEDSEVKIQTLDS

SEQ ID NO: 109 - protein, 85 aa, Bacillus thuringiensis
AIDAALTKVADNRATLGATLNRLDFNVNNLKSQSSSMASAASQIEDADMAKEMSEMTKFKILNEAGISMLSQANQTPQMVSKLLQ

SEQ ID NO: 110 - protein, 153 aa, Bacillus thuringiensis; identical to SEQ ID NO: 108

SEQ ID NO: 111 - protein, 86 aa, Bacillus thuringiensis
AAIDAALTKVADNRATLGATLNRLDFNVNNLKSQSSSMASAASQIEDADMAKEMSEMTKFKILNEAGISMLSQANQTPQMVSKLLQ

SEQ ID NO: 112 - protein, 140 aa, Bacillus cereus
GFLNMRINTNINSMRTQEYMRQNQAKMSNAMDRLSSGKRINNASDDAAGLAIATRMRARESGLGVAANNTQDGMSLIRTADSALNSVSNILLRMRDLANQSANGTNTAENKAAMQKEFGELKDQIKYISENTQFNDQHLL

SEQ ID NO: 113 - protein, 78 aa, Bacillus cereus
TVADNRATLGATLNRLDFNVNNLKSQSASMASAASQIEDADMAKEMSEMTKFKILNEAGISMLSQANQTPQMVSKLLQ

SEQ ID NO: 114 - protein, 140 aa, Bacillus thuringiensis
GFLNMRINTNINSMRTQEYMRQNQAKMSNAMDRLSSGKRINNASDDAAGLAIATRMRARESGLGVAANNTQDGMSLIRTADSALNSVSNILLRMRDIANQSANGTNTSDNQKALDKEFSALKEQIDYISKNTEFNDKKLL

SEQ ID NO: 115 - protein, 88 aa, Bacillus thuringiensis
AIKSIDAALDTIASNRATLGATLNRLDFNVNNLKSQSSSMASAASQIEDADMAKEMSEMTKFKILNEAGISMLSQANQTPQMVSKLLQ

SEQ ID NO: 116 - protein, 137 aa, Bacillus thuringiensis
WGFLIMRINTNINSMRTQEYMRQNQAKMSNAMDRLSSGKRINNASDDAAGLAIATRMRARESGLGVAANNTQDGMSLIRTADSALNSVSNILLRMRDIANQSANGTNTADNQQALQKEFGQLKEQISYIADNTEFND

SEQ ID NO: 117 - protein, 88 aa, Bacillus thuringiensis
AVDAIDAALKTVASNRATLGATLNRLDFNVNNLKSQSASMASAASQIEDADMAKEMSEMTKFKILNEAGISMLSQANQTPQMVSKLLQ

SEQ ID NO: 118 - protein, 141 aa, Bacillus thuringiensis
WGFLIMRINTNINSMRTQEYMRQNQAKMSNAMDRLSSGKRINNASDDAAGLAIATRMRARESGLGVAANNTQDGMSLIRTADSALNSVSNILLRMRDIANQSANGTNTADNQQALQKEFGQLKEQISYIADNTEFNDKTLL

SEQ ID NO: 119 - protein, 88 aa, Bacillus thuringiensis; identical to SEQ ID NO: 117

SEQ ID NO: 120 - protein, 141 aa, Bacillus thuringiensis
WGFLIMRINTNINSMRTQEYMRQNQAKMSNAMDRLSSGKRINNASDDAAGLAIATRMRARESGLGVAANNTQDGMSLIRTADSAMNSVSNILLRMRDISNQSANGTNTDKNQSALDKEFAALKDQIDYISKNTEFNDQKLL

SEQ ID NO: 121 - protein, 88 aa, Bacillus thuringiensis
AIASIDAALESIASNRATLGATLNRLDFNVNNLKSQSSSMASAASQIEDADMAKEMSEMTKFKILNEAGISMLSQANQTPQMVSKLLQ

SEQ ID NO: 122 - protein, 140 aa, Bacillus thuringiensis
GFLNMRINTNINSMRTQEYMRQNQAKMSNAMDRLSSGKRINNASDDAAGLAIATRMRARESGLGVAANNTQDGMSLIRTADSAMNSVSNILLRMRDISNQSANGTNTDKNQSALDKEFAALKDQIDYISKNTEFNDQKLL

SEQ ID NO: 123 - protein, 88 aa, Bacillus thuringiensis; identical to SEQ ID NO: 121

SEQ ID NO: 124 - protein, 140 aa, Bacillus thuringiensis; identical to SEQ ID NO: 122

SEQ ID NO: 125 - protein, 88 aa, Bacillus thuringiensis; identical to SEQ ID NO: 121

SEQ ID NO: 126 - protein, 140 aa, Bacillus thuringiensis; identical to SEQ ID NO: 122

SEQ ID NO: 127 - protein, 88 aa, Bacillus thuringiensis; identical to SEQ ID NO: 121

SEQ ID NO: 128 - protein, 140 aa, Bacillus thuringiensis; identical to SEQ ID NO: 122

SEQ ID NO: 129 - protein, 88 aa, Bacillus thuringiensis; identical to SEQ ID NO: 121

SEQ ID NO: 130 - protein, 140 aa, Bacillus thuringiensis
GFLNMRINTNINSMRTQEYMRQNQAKMSNAMDRLSSGKRINNASDDAAGLAIATRMRARESGLGVAANNTQDGISLIRTADSAMNSVSNILLRMRDLANQSANGTNTNENQAALNKEFDALKEQIDYISTNTEFNDKKLL

SEQ ID NO: 131 - protein, 73 aa, Bacillus thuringiensis; identical to SEQ ID NO: 105

SEQ ID NO: 132 - protein, 140 aa, Bacillus thuringiensis; identical to SEQ ID NO: 130

SEQ ID NO: 133 - protein, 73 aa, Bacillus thuringiensis; identical to SEQ ID NO: 105

SEQ ID NO: 134 - protein, 140 aa, Bacillus weihenstephanensis
GVLNMRINTNINSMRTQEYMRQNQAKMSNAMDRLSSGKRINNASDDAAGLAIATRMRARESGLSVAANNTQDGMSLIRTADSAMNSVSNILLRMRDLSNQSANGTNTDENQQALNKEFAALKDQIDYISKNTEFNDKKLL

SEQ ID NO: 135 - protein, 73 aa, Bacillus weihenstephanensis; identical to SEQ ID NO: 105

SEQ ID NO: 136 - protein, 140 aa, Bacillus thuringiensis
GFLNMRINTNINSMRTQEYMRQNQAKMSNAMDRLSSGKRINNASDDAAGLAIATRMRARESGLGVAANNTQDGMSLIRTADSALNSVSNILLRMRDIANQSANGTNTGDNQKALDKEFSALKEQIDYISKNTEFNDKKLL

SEQ ID NO: 137 - protein, 85 aa, Bacillus thuringiensis
IDAALETIASNRATLGATLNRLDFNVNNLKSQSSSMASAASQIEDADMAKEMSEMTKFKILNEAGISMLSQANQTPQMVSKLLQS

SEQ ID NO: 138 - protein, 141 aa, Bacillus thuringiensis
WGFLIMRINTNINSMRTQEYMRQNQTKMSNAMDRLSSGKRINNASDDAAGLAIATRMRARENGLGVAANNTQDGMSLIRTADSAMNSVSNILLRMRDLANQSANGTNTDDNQKALDKEFSALKEQIDYISKNTEFNDKKLL

SEQ ID NO: 139 - protein, 70 aa, Bacillus thuringiensis
LGATLNRLDFNVNNLKSQSSSMAAAASQIEDADMAKEMSEMTKFKILNEAGISMLSQANQTPQMVSKLLQ

SEQ ID NO: 140 - protein, 141 aa, Bacillus thuringiensis; identical to SEQ ID NO: 138

SEQ ID NO: 141 - protein, 70 aa, Bacillus thuringiensis; identical to SEQ ID NO: 139

SEQ ID NO: 142 - protein, 141 aa, Bacillus thuringiensis; identical to SEQ ID NO: 138

SEQ ID NO: 143 - protein, 73 aa, Bacillus thuringiensis
RATLGATLNRLDFNVNNLKSQSSSMAAAASQIEDADMAKEMSEMTKFKILNEAGISMLSQANQTPQMVSKLLQ

SEQ ID NO: 144 - protein, 140 aa, Bacillus thuringiensis
GFLNMRINTNINSMRTQDYMRQNQAKMSNAMDRLSSGKRINNASDDAAGLAIATRMRARESGLGVAANNTQDGMSLIRTADSAMNSVSNILLRMRDISNQSANGTNTDKNQSALDKEFAALKDQIDYISKNTEFNDQKLL

SEQ ID NO: 145 - protein, 88 aa, Bacillus thuringiensis; identical to SEQ ID NO: 121

SEQ ID NO: 146 - protein, 173 aa, Bacillus thuringiensis
GFLNMARITINLEIDFFAYYRFSICRKVNIKKWGFLNMRINTNINSMRTQDYMRQNQAKMSNAMDRLSSGKRINNASDDAAGLAIATRMRARESGLGVAANNTQDGMSLIRTADSAMNSVSNILLRMRDISNQSANGTNTDKNQSALDKEFAALKDQIDYISKNTEFNDQKLL

SEQ ID NO: 147 - protein, 88 aa, Bacillus thuringiensis; identical to SEQ ID NO: 121

SEQ ID NO: 148 - protein, 157 aa, Bacillus cereus
GVLYMRINTNINSMRTQEYMRQNQAKMSNAMDRLSSGKRINNASDDAAGLAIATRMRARESGLSVAADNTQNGMSLIRTADSAMNSVSNILLRMRDIANQSANGTNTDKNQVALQKEFAALKEQITYIADNTQFNDKNLLNGNQTINIQTLDSHDST

SEQ ID NO: 149 - protein, 78 aa, Bacillus cereus
TVADNRATLGATLNRLDFNVNNLKSQSSAMAASASQIEDADMAKEMSEMTKFKILNEAGISMLSQANQTPQMVSKLLQ

SEQ ID NO: 150 - protein, 157 aa, Bacillus cereus; identical to SEQ ID NO: 148

SEQ ID NO: 151 - protein, 78 aa, Bacillus cereus; identical to SEQ ID NO: 149

SEQ ID NO: 152 - protein, 140 aa, Bacillus thuringiensis; identical to SEQ ID NO: 136

SEQ ID NO: 153 - protein, 70 aa, Bacillus thuringiensis
LGATLNRLDFNVNNLKSQSSSMASAASQIEDADMAKEMSEMTKFKILNEAGISMLSQANQTPQMVSKLLQ

SEQ ID NO: 154 - protein, 140 aa, Bacillus thuringiensis
GFLNMRINTNINSMRTQEYMRQNQTKMSNAMDRLSSGKRINNASDDAAGLAIATRMRARENGLGVAANNTQDGMSLIRTADSALNSVSNILLRMRDIANQSANGTNTSDNQKALDKEFSALKEQIDYISKNTEFNDKKLL

SEQ ID NO: 155 - protein, 88 aa, Bacillus thuringiensis; identical to SEQ ID NO: 115

SEQ ID NO: 156 - protein, 140 aa, Bacillus thuringiensis; identical to SEQ ID NO: 136

SEQ ID NO: 157 - protein, 73 aa, Bacillus thuringiensis; identical to SEQ ID NO: 105

SEQ ID NO: 158 - protein, 140 aa, Bacillus thuringiensis; identical to SEQ ID NO: 136

SEQ ID NO: 159 - protein, 73 aa, Bacillus thuringiensis; identical to SEQ ID NO: 105

SEQ ID NO: 160 - protein, 153 aa, Bacillus thuringiensis
GFLNMRINTNINSMRTQEYMRQNQAKMSNAMDRLSSGKRINNASDDAAGLAIATRMRARESGLGVAANNTQDGMSLIRTADSAMNSVSNILLRMRDIANQSANGTNTNGNQAALNKEFDALKQQINYISTNTEFNDKKLLDGSNKTIAIQTLD

SEQ ID NO: 161 - protein, 70 aa, Bacillus thuringiensis
LGATLNRLDFNVNNLKSQQSSMASAASQIEDADMAKEMSEMTKFKILNEAGISMLSQANQTPQMVSKLLQ

SEQ ID NO: 162 - protein, 136 aa, Bacillus cereus
GVLNMRINTNINSMRTQEYMRQNQAKMSNAMDRLSSGKRINNASDDAAGLAIATRMRARESGLGVAANNTQDGMALIRTADSAMNSVSNILLRRDIANQSANGTNTDKNQAALQKEFGELQKQIDYIAGNTQFNDK

SEQ ID NO: 163 - protein, 86 aa, Bacillus cereus
DKIDEALKTIADNRATLGATLNRLDFNVNNLKSQSASMASAASQIEDADMAKEMSEMTKFKILNEAGISMLSQANQTPQMVSKLLQ

SEQ ID NO: 164 - protein, 141 aa, Bacillus thuringiensis
WGFLIMRINTNINSMRTQEYMRQNQAKMSNAMDRLSSGKRINNASDDAAGLAIATRMRARESGLGVAANNTQDGMSLIRTADSAMNSVSNILLRMRDLANQSANGTNTNENQAALNKEFDALKEQINYISTNTEFNDKKLL

SEQ ID NO: 165 - protein, 73 aa, Bacillus thuringiensis
RATLGATLNRLDFNVNNLKSQQSSMASAASQIEDADMAKEMSEMTKFKILNEAGISMLSQANQTPQMVSKLLQ

SEQ ID NO: 166 - protein, 141 aa, Bacillus cereus
WGFFYMRINTNINSMRTQEYMRQNQAKMSNAMDRLSSGKRINNASDDAAGLAIATRMRARESGLGVASNNTQDGMSLIRTADSALNSVSNILLRMRDLANQSANGTNTNENKAAMQKEFGELKEQIKYIAENTQFNDQHLL

SEQ ID NO: 167 - protein, 78 aa, Bacillus cereus
TVADNRATLGATLNRLDFNVNNLKSQASSMAAAASQVEDADMAKEMSEMTKFKILNEAGISMLSQANQTPQMVSKLLQ

SEQ ID NO: 168 - protein, 141 aa, Bacillus cereus; identical to SEQ ID NO: 166

SEQ ID NO: 169 - protein, 78 aa, Bacillus cereus; identical to SEQ ID NO: 167

SEQ ID NO: 170 - protein, 140 aa, Bacillus cereus
GVLNMRINTNINSLRTQEYMRQNQAKMSNSMDRLSSGKRINNASDDAAGLAIATRMRARESGLNVAANNTQDGMSLIRTADSALGSVSNILLRMRDLANQSANGTNTSDNQAAMQKEFAELQKQITYIADNTQFNDKNLL

SEQ ID NO: 171 - protein, 84 aa, Bacillus cereus
IDAALKTVADNRATLGATLNRLDFNVNNLKSQSSSMASAASQIEDADMAKEMSEMTKFKILNEAGISMLSQANQTPQMVSKLLQ

SEQ ID NO: 172 - protein, 141 aa, Bacillus cereus; identical to SEQ ID NO: 166

SEQ ID NO: 173 - protein, 78 aa, Bacillus cereus; identical to SEQ ID NO: 167

SEQ ID NO: 174 - protein, 141 aa, Bacillus cereus; identical to SEQ ID NO: 166

SEQ ID NO: 175 - protein, 77 aa, Bacillus cereus
TVADNRATLGATLNRLDFNVNNLKSQASSAAAASQVEDADMAKEMSEMTKFKILNEAGISMLSQANQTPQMVSKLLQ

SEQ ID NO: 176 - protein, 140 aa, Bacillus cereus; identical to SEQ ID NO: 136

SEQ ID NO: 177 - protein, 70 aa, Bacillus cereus; identical to SEQ ID NO: 153

SEQ ID NO: 178 - protein, 128 aa, Bacillus thuringiensis
GFLNMRINTNINSMRTQEYMRQNQTKMSNAMDRLSSGKRINNASDDAAGLAIATRMRSREGGLNVAARNTEDGMSLIRTADSALNSVSNILLRMRDLANQSASETNTSKNQAAMQKEFDQLKEQIQYI

SEQ ID NO: 179 - protein, 73 aa, Bacillus thuringiensis; identical to SEQ ID NO: 101

SEQ ID NO: 180 - protein, 128 aa, Bacillus thuringiensis; identical to SEQ ID NO: 178

SEQ ID NO: 181 - protein, 73 aa, Bacillus thuringiensis; identical to SEQ ID NO: 101

SEQ ID NO: 182 - protein, 141 aa, Bacillus thuringiensis
MGVLNMRINTNINSMRTQEYMRQNQAKMSTAMDRLSSGKRINNASDDAAGLAIATRMRARESGLGVAANNTQDGISLIRTADSAMNSVSNILLRMRDLANQSANGTNTDKNQGALDKEFAALKEQIDYISKNTEFNDKKLL

SEQ ID NO: 183 - protein, 88 aa, Bacillus thuringiensis
AIKAIDEALETIASNRATLGATLNRLDFNVNNLKNQASSMASAASQVEDADMAKEMSEMTKFKILNEAGISMLSQANQTPQMVSKLLQ

SEQ ID NO: 184 - protein, 141 aa, Bacillus thuringiensis
MGVLNMRINTNINSMRTQEYMRQNQAKMSNAMDRLSSGKRINNASDDAAGLAIATRMRARESGLGVAANNTQDGISLIRTADSAMNSVSNILLRMRDLANQSANGTNTSENQAALDKEFGALKEQINYISTNTEFNDKKLL

SEQ ID NO: 185 - protein, 85 aa, Bacillus thuringiensis
AIDSALENIASNRATLGATLNRLDFNVNNLKSQSSSMASAASQIEDADMAKEMSEMTKFKILNEAGISMLSQANQTPQMVSKLLQ

SEQ ID NO: 186 - protein, 141 aa, Bacillus cereus; identical to SEQ ID NO: 182

SEQ ID NO: 187 - protein, 70 aa, Bacillus cereus
LGATLNRLDFNVNNLKNQASSMASAASQVEDADMAKEMSEMTKFKILNEAGISMLSQANQTPQMVSKLLQ

SEQ ID NO: 188 - protein, 141 aa, Bacillus cereus; identical to SEQ ID NO: 182

SEQ ID NO: 189 - protein, 68 aa, Bacillus cereus
ATLNRLDFNVNNLKNQASSMASAASQVEDADMAKEMSEMTKFKILNEAGISMLSQANQTPQMVSKLLQ

SEQ ID NO: 190 - protein, 140 aa, Bacillus cereus
WGFFYMRINTNINSMRTQEYMRQNQAKMSTAMDRLSSGKRINNASDDAAGLAIATRMRARESGLGVAANNTQDGISLIRTADSAMNSVSNILLRMRDLANQSANGTNTDKNQAALDKEFNALKEQIDYISKNTEFNDKKL

SEQ ID NO: 191 - protein, 88 aa, Bacillus cereus
AIAAIDAALTKVADNRATLGATLNRLDFNVNNLKSQASSMASAASQVEDADMAKEMSEMTKFKILNEAGISMLSQANQTPQMVSKLLQ

SEQ ID NO: 192 - protein, 137 aa, Bacillus cereus
WGFFYMRIGTNVLSLNARQSLYENEKRMNVAMEHLATGKKLNNASDNPANIAIVTRMHARASGMRVAIRNNEDAISMLRTAEAALQTVTNVLQRMRDLAVQSANGTNSNKNRDSLNKEFQSLTEQIGYIDETTEFNN

SEQ ID NO: 193 - protein, 88 aa, Bacillus cereus
AIRKIEEALQNVSLHRADLGAMINRLQFNIENLNSQSTALTDAASRIEDADMAQEMSDFLKFKLLTEVALSMVSQANQVPQMVSKLLQ

SEQ ID NO: 194 - protein, 106 aa, Bacillus thuringiensis
LVPFAVWLAMSRIRRRILDTDCKAESAVRIKEIPSDVLRAATERPLSCARIRVAIARPAASSEALLIRLPLDKRSIALLILAWFWRMYSCVRMLLMFVLILMLRTP

SEQ ID NO: 195 - protein, 49 aa, Bacillus thuringiensis
MAASASQIEDADMAKEMSEMTKFKILSEAGISMLSQANQTPQMVSKLLQ

SEQ ID NO: 196 - protein, 102 aa, Bacillus cereus
AVWLAMSRIRRRILDTDCKAESAVRIKEIPSDVLRAATERPLSCARIRVAIARPAASSEALLIRLPLDKRSIALLILAWFWRMYSCVRMLLMFVLILMLRTP

SEQ ID NO: 197 - protein, 50 aa, Bacillus cereus
SMAASASQIEDADMAKEMSEMTKFKILSEAGISMLSQANQTPQMVSKLLQ

SEQ ID NO: 198 - protein, 128 aa, Bacillus thuringiensis
GFLNMRIGTNFLSMNARQSLYENEKRMNVAMEHLATGKKLNHASDNPANIAIVTRMHARANGMRVAIRNNEDAISMLRTAEAALQTVMNILQRMRDLAIQSANSTNSNKNRDSLNKEFQSLTEQISYI

SEQ ID NO: 199 - protein, 70 aa, Bacillus thuringiensis
LGAMINRLHFNIENLNSQSMALTDAASRIEDADMAQEMSDFLKFKLLTEVALSMVSQANQIPQMVSKLLQ

SEQ ID NO: 200 - protein, 128 aa, Bacillus thuringiensis
GFLNMRINTNINSMRTQEYMRQNQAKMSNAMDRLSSGKRINNASDDAAGLAIATRMRARESGLGVAANNTQDGMSLIRTADSALNSVSNILLRMRDIANQSANGTNTGDNQKALDKEFSALKEQIDYI

SEQ ID NO: 201 - protein, 70 aa, Bacillus thuringiensis; identical to SEQ ID NO: 153

SEQ ID NO: 202 - protein, 154 aa, Bacillus aryabhattai
MRINHNITALNTYRQFNNANNAQAKSMEKLSSGQRINSASDDAAGLAISEKMRGQIRGLDQASRNAQDGVSLIQTAEGALNETHDILQRMRELVVQAGNGTNKTEDLDAIQDEIGSLIEEIGGETDSKGISDRAQFNGRNLLDGSLDITLQVGA

SEQ ID NO: 203 - protein, 52 aa, Bacillus aryabhattai
IDGAINQVSEQRSGLGATQNRLDHTINNLSTSSENLTASESRIRDVDYALAA

SEQ ID NO: 204 - protein, 148 aa, Bacillus manliponensis
MRINTNINSMRTQEYMRQNQDKMNTSMNRLSSGKQINSASDDAAGLAIATRMRAKEGGLNVGAKNTQDGMSALRTMDSALNSVSNILLRMRDLATQSATGTNQGNDRESLDLEFQQLTEEITHIAEKTNFNGNALLSGSGSAINVQLS

SEQ ID NO: 205 - protein, 84 aa, Bacillus manliponensis
IDQAIQDIADNRATYGSQLNRLDHNLNNVNSQATNMAAAASQIEDADMAKEMSEMTKFKILSEAGVSMLSQANQTPQMVSKLLQ

SEQ ID NO: 206 - protein, 151 aa, Lysinibacillus sp.
MRIGSWTATGMSIVNHMNRNWNAASKSMLRLSSGYRINSAADDAAGLAISEKMRGQIRGLTMASKNIMDGVSLIQTAEGALNETHAIVQRMRELAVQAATDTNTDDDRAKLDLEFQELKKEIDRISTDTEFNTRTLLNGDYKDNGLKIQVG

SEQ ID NO: 207 - protein, 84 aa, Lysinibacillus sp.
LDEATKNVSMERSRLGAYQNRLEHAYNVAENTAINLQDAESRIRDVDIAKEMMNMVKSQILAQVGQQVLAMHMQQAQGILRLLG

SEQ ID NO: 208 - protein, 151 aa, Lysinibacillus sp.
MKIGSWTATGMSIVNHMNRNWNAASKSMLRLSSGYRINSAADDAAGLAISEKMRGQIRGLTMASKNIMDGVSLIQTAEGALNETHAIVQRMRELAVQAATDTNTDDDRAKLDLEFQELKKEIDRISTDTAFNTRTLLNGDYKDNGLKIQVG

SEQ ID NO: 209 - protein, 84 aa, Lysinibacillus sp.
LDEATKNVSMERSRLGAYQNRLEHAYNVAENTAINLQDAESRIRDVDIAKEMMHMVKSQILAQVGQQVLAMHIQQAQGILRLLG

SEQ ID NO: 210 - protein, 148 aa, Paenibacillus sp.
MIISHNLTALNTMNKLKQKDLAVSKSLGKLSSGLRINGASDDAAGLAISEKMRGQIRGLNQASRNIQDGISLIQVADGAMQEIHSMLQRMNELAVQASNGTYSGSDRLNIQSEVEQLIEEIDEIAGNTGFNGIKLLNGNNEKTEKTEK

SEQ ID NO: 211 - protein, 84 aa, Paenibacillus sp.
ISAAIDKVSAERARMGAYQNRLEHSRNNVVTYAENLTAAESRIRDVDMAKEMMELMKNQIFTQAGQAMLLQTNTQPQAILQLLK

SEQ ID NO: 212 - protein, 148 aa, Bacillus anthracis
MRINTNINSMRTQEYMRQNQAKMSNAMDRLSSGKRINNASDDAAGLAIATRMRARESGLGVAANNTQDGMSLIRTADSAMNSVSNILLRMRDLANQSANGTNTKENQDALDKEFGALKEQIDYISKNTEFNDKKLLNGDNKSIAIQTL

SEQ ID NO: 213 - protein, 84 aa, Bacillus anthracis
IDSALETIASNRATLGATLNRLDFNVNNLKSQSSAMASAASQIEDADMAKEMSEMTKFKILNEAGISMLSQANQTPQMVSKLLQ

SEQ ID NO: 214 - protein, 172 aa, Bacillus anthracis
MQKSQYKKMGVLKMRINTNINSMRTQEYMRQNQDKMNVSMNRLSSGKRINSAADDAAGLAIATRMRARQSGLEKASQNTQDGMSLIRTAESAMNSVSNILTRMRDIAVQSSNGTNTAENQSALQKEFAELQEQIDYIAKNTEFNDKNLLAGTGAVTIGSTSISGAEISIETL

SEQ ID NO: 215 - protein, 81 aa, Bacillus anthracis
ALNTVAGNRATLGATLNRLDRNVENLNNQATNMASAASQIEDADMAKEMSEMTKFKILNEAGISMLSQANQTPQMVSKLLQ

SEQ ID NO: 216 - protein, 159 aa, Bacillus anthracis
MRINTNINSMRTQEYMRQNQDKMNVSMNRLSSGKRINSAADDAAGLAIATRMRARQSGLEKASQNTQDGMSLIRTAESAMNSVSNILTRMRDIAVQSSNGTNTAENQSALQKEFAELQEQIDYIAKNTEFNDKNLLAGTGAVTIGSTSISGAEISIETL

SEQ ID NO: 217 - protein, 81 aa, Bacillus anthracis
ALNTVAGNRATLGATLNRLDRNVENLNNQATNMASAASQIKDADKAKEMSEMTKFKILNEAGISMLSQANQTPQMVSKLLQ

SEQ ID NO: 218 - protein, 159 aa, Bacillus anthracis; identical to SEQ ID NO: 216

SEQ ID NO: 219 - protein, 76 aa, Bacillus anthracis
ALNTVAGNRATLGATLNRLDRNVENLNNQATNMASAASQIEDADMAKEMSEMTKFKILNEAGISMLSQANQTPQMV

SEQ ID NO: 220 - protein, 137 aa, Bacillus anthracis
MNVSMNRLSSGKRINSAADDAAGLAIATRMRARQSGLEKASQNTQDGMSLIRTAESAMNSVSNILTRMRDIAVQSSNGTNTAENQSALQKEFAELQEQIDYIAKNTEFNDKNLLAGTGAVTIGSTSISGAEISIETL

SEQ ID NO: 221 - protein, 84 aa, Bacillus anthracis
LNTALNTVAGNRATLGATLNRLDRNVENLNNQATNMASAASQIEDADMAKEMSEMTKFKILNEAGISMLSQANQTPQMVSKLLQ

SEQ ID NO: 222 - protein, 154 aa, Bacillus megaterium
MRINHNITALNTYRQFNNANNAQAKSMEKLSSGQRINSASDDAAGLAISEKMRGQIRGLDQASRNAQDGVSLIQTAEGALNETHDILQRMRELVVQAGNGTNKTEDLDAIQDEIGSLIEEIGGEADSKGISDRAQFNGRNLLDGSLDITLQVGA

SEQ ID NO: 223 - protein, 53 aa, Bacillus megaterium
IIDGAINQVSEQRSGLGATQNRLDHTINNLSTSSENLTASESRIRDVDYALAA

SEQ ID NO: 224 - protein, 148 aa, Aneurinibacillus sp.
MRINHNLPALNAYRNLAQNQIGTSKILERLSSGYRINRASDDAAGLAISEKMRGQIRGLEQGQRNTMDGVSLIQTAEGALQEIHEMLQRMRELAVQAANGTYSDKDKKAIEDEINQLTAQIDQIAKTTEFNGIQLIGDSDSTSLQDVK

SEQ ID NO: 225 - protein, 85 aa, Aneurinibacillus sp.
FKAAIDQVSRIRSYFGAIQNRLEHVVNNLSNYTENLTGAESRIRDADMAKEMTEFTRFNIINQSATAMLAQANQLPQGVLQLLKG

SEQ ID NO: 226 - protein, 22 aa, Bacillus thuringiensis
DRLSSGKRINSASDDAAGLAIA

SEQ ID NO: 227 - protein, 22 aa, Bacillus thuringiensis
DRLSSGKRINSASDDAAGLAIA

SEQ ID NO: 228 - protein, 22 aa, Bacillus thuringiensis
DRLSSGKRINSASDDAAGLAIA

SEQ ID NO: 229 - protein, 22 aa, Bacillus cereus
DRLSSGKRINSASDDAAGLAIA

SEQ ID NO: 230 - protein, 22 aa, Bacillus thuringiensis
EHLATGKKLNNASDNPANIAIV

SEQ ID NO: 231 - protein, 23 aa, Bacillus thuringiensis
DRLSSGKRINNASDDAAGLAIAT

SEQ ID NO: 232 - protein, 22 aa, Bacillus thuringiensis
DRLSSGKRINNASDDAAGLAIA

SEQ ID NO: 233 - protein, 22 aa, Bacillus thuringiensis
DRLSSGKRINNASDDAAGLAIA

SEQ ID NO: 234 - protein, 22 aa, Bacillus cereus
DRLSSGKRINNASDDAAGLAIA

SEQ ID NO: 235 - protein, 22 aa, Bacillus cereus
EHLATGKKLNHASDNPANVAIV

SEQ ID NO: 236 - protein, 22 aa, Bacillus thuringiensis
DRLSSGKRINNASDDAAGLAIA

SEQ ID NO: 237 - protein, 22 aa, Bacillus bombysepticus
DRLSSGKRINNASDDAAGLAIA

SEQ ID NO: 238 - protein, 22 aa, Bacillus thuringiensis
DRLSSGKRINNASDDAAGLAIA

SEQ ID NO: 239 - protein, 22 aa, Bacillus thuringiensis
DRLSSGKRINNASDDAAGLAIA

SEQ ID NO: 240 - protein, 22 aa, Bacillus cereus
DRLSSGKRINNASDDAAGLAIA

SEQ ID NO: 241 - protein, 22 aa, Bacillus cereus
EHLATGKKLNNASDNPANIAIV

SEQ ID NO: 242 - protein, 22 aa, Bacillus thuringiensis
EHLATGKKLNHASDNPANVAIV

SEQ ID NO: 243 - protein, 22 aa, Bacillus thuringiensis
DRLSSGKRINNASDDAAGLAIA

SEQ ID NO: 244 - protein, 22 aa, Bacillus cereus
DRLSSGKRINNASDDAAGLAIA

SEQ ID NO: 245 - protein, 22 aa, Bacillus thuringiensis
DRLSSGKRINNASDDAAGLAIA

SEQ ID NO: 246 - protein, 22 aa, Bacillus thuringiensis
DRLSSGKRINNASDDAAGLAIA

SEQ ID NO: 247 - protein, 22 aa, Bacillus thuringiensis
EHFATGKKLNHASDNPANVAIV

SEQ ID NO: 248 - protein, 22 aa, Bacillus thuringiensis
DRLSSGKRINNASDDAAGLAIA

SEQ ID NO: 249 - protein, 22 aa, Bacillus thuringiensis
EHLATGKKLNHASDNPANIVIV

SEQ ID NO: 250 - protein, 22 aa, Bacillus thuringiensis
DRLSSGKRINNASDDAAGLAIA

SEQ ID NO: 251 - protein, 22 aa, Bacillus thuringiensis
DRLSSGKRINNASDDAAGLAIA

SEQ ID NO: 252 - protein, 22 aa, Bacillus thuringiensis
DRLSSGKRINNASDDAAGLAIA

SEQ ID NO: 253 - protein, 22 aa, Bacillus thuringiensis
DRLSSGKRINNASDDAAGLAIA

SEQ ID NO: 254 - protein, 22 aa, Bacillus thuringiensis
DRLSSGKRINNASDDAAGLAIA

SEQ ID NO: 255 - protein, 22 aa, Bacillus weihenstephanensis
DRLSSGKRINNASDDAAGLAIA

SEQ ID NO: 256 - protein, 22 aa, Bacillus thuringiensis
DRLSSGKRINNASDDAAGLAIA

SEQ ID NO: 257 - protein, 22 aa, Bacillus thuringiensis
EHLATGKKLNHASDNPANVAIV

SEQ ID NO: 258 - protein, 22 aa, Bacillus thuringiensis
DRLSSGKRINNASDDAAGLAIA

SEQ ID NO: 259 - protein, 22 aa, Bacillus thuringiensis
DRLSSGKRINNASDDAAGLAIA

SEQ ID NO: 260 - protein, 22 aa, Bacillus thuringiensis
EHLATGKKLNHASDNPANIVIV

SEQ ID NO: 261 - protein, 22 aa, Bacillus thuringiensis
DRLSSGKRINNASDDAAGLAIA

SEQ ID NO: 262 - protein, 22 aa, Bacillus cereus
EHLATGKKLNHASNNPANVAIV

SEQ ID NO: 263 - protein, 22 aa, Bacillus cereus
DRLSSGKRINNASDDAAGLAIA

SEQ ID NO: 264 - protein, 22 aa, Bacillus thuringiensis
EHLATGKKLNHASDNPANIAIV

SEQ ID NO: 265 - protein, 22 aa, Bacillus thuringiensis
DRLSSGKRINNASDDAAGLAIA

SEQ ID NO: 266 - protein, 22 aa, Bacillus thuringiensis
DRLSSGKRINNASDDAAGLAIA

SEQ ID NO: 267 - protein, 22 aa, Bacillus thuringiensis
DRLSSGKRINNASDDAAGLAIA

SEQ ID NO: 268 - protein, 22 aa, Bacillus thuringiensis
DRLSSGKRINNASDDAAGLAIA

SEQ ID NO: 269 - protein, 22 aa, Bacillus cereus
DRLSSGKRINNASDDAAGLAIA

SEQ ID NO: 270 - protein, 22 aa, Bacillus thuringiensis
DRLSSGKRINNASDDAAGLAIA

SEQ ID NO: 271 - protein, 22 aa, Bacillus cereus
EHLATGKKLNNASDNPANIAIV

SEQ ID NO: 272 - protein, 22 aa, Bacillus cereus
DRLSSGKRINNASDDAAGLAIA

SEQ ID NO: 273 - protein, 22 aa, Bacillus cereus
DRLSSGKRINNASDDAAGLAIA

SEQ ID NO: 274 - protein, 22 aa, Bacillus cereus
DRLSSGKRINNASDDAAGLAIA

SEQ ID NO: 275 - protein, 22 aa, Bacillus cereus
DRLSSGKRINNASDDAAGLAIA

SEQ ID NO: 276 - protein, 22 aa, Bacillus cereus
DRLSSGKRINNASDDAAGLAIA

SEQ ID NO: 277 - protein, 22 aa, Bacillus thuringiensis
DRLSSGKRINNASDDAAGLAIA

SEQ ID NO: 278 - protein, 22 aa, Bacillus thuringiensis
DRLSSGKRINNASDDAAGLAIA

SEQ ID NO: 279 - protein, 22 aa, Bacillus thuringiensis
DRLSSGKRINNASDDAAGLAIA

SEQ ID NO: 280 - protein, 22 aa, Bacillus thuringiensis
DRLSSGKRINNASDDAAGLAIA

SEQ ID NO: 281 - protein, 22 aa, Bacillus cereus
EHLATGKKLNHASNNPANIAIV

SEQ ID NO: 282 - protein, 22 aa, Bacillus cereus
DRLSSGKRINNASDDAAGLAIA

SEQ ID NO: 283 - protein, 22 aa, Bacillus cereus
DRLSSGKRINNASDDAAGLAIA

SEQ ID NO: 284 - protein, 22 aa, Bacillus cereus
EHLATGKKLNNASDNPANIAIV

SEQ ID NO: 285 - protein, 22 aa, Bacillus thuringiensis
DRLSSGKRINNASDDAAGLAIA

SEQ ID NO: 286 - protein, 22 aa, Bacillus cereus
DRLSSGKRINNASDDAAGLAIA

SEQ ID NO: 287 - protein, 22 aa, Bacillus thuringiensis
EHLATGKKLNHASDNPANIAIV

SEQ ID NO: 288 - protein, 22 aa, Bacillus thuringiensis
DRLSSGKRINNASDDAAGLAIA

SEQ ID NO: 289 - protein, 22 aa, Bacillus aryabhattai
EKLSSGQRINSASDDAAGLAIS

SEQ ID NO: 290 - protein, 22 aa, Bacillus manliponensis
NRLSSGKQINSASDDAAGLAIA

SEQ ID NO: 291 - protein, 22 aa, Lysinibacillus sp.
LRLSSGYRINSAADDAAGLAIS

SEQ ID NO: 292 - protein, 22 aa, Lysinibacillus sp.
LRLSSGYRINSAADDAAGLAIS

SEQ ID NO: 293 - protein, 22 aa, Paenibacillus sp.
GKLSSGLRINGASDDAAGLAIS

SEQ ID NO: 294 - protein, 22 aa, Bacillus anthracis
DRLSSGKRINNASDDAAGLAIA

SEQ ID NO: 295 - protein, 22 aa, Bacillus anthracis
NRLSSGKRINSAADDAAGLAIA

SEQ ID NO: 296 - protein, 22 aa, Bacillus anthracis
NRLSSGKRINSAADDAAGLAIA

SEQ ID NO: 297 - protein, 22 aa, Bacillus anthracis
NRLSSGKRINSAADDAAGLAIA

SEQ ID NO: 298 - protein, 22 aa, Bacillus anthracis
NRLSSGKRINSAADDAAGLAIA

SEQ ID NO: 299 - protein, 22 aa, Bacillus megaterium
EKLSSGQRINSASDDAAGLAIS

SEQ ID NO: 300 - protein, 22 aa, Aneurinibacillus sp.
ERLSSGYRINRASDDAAGLAIS

SEQ ID NO: 301 - protein, 28 aa, Bacillus thuringiensis
SVSNILLRMRDLANQSANGTNTKGNQAS

SEQ ID NO: 302 - protein, 28 aa, Bacillus thuringiensis
SVSNILLRMRDLANQSANGTNTKGNQAS

SEQ ID NO: 303 - protein, 28 aa, Bacillus thuringiensis
SVSNILLRMRDLANQSANGTNTKGNQAS

SEQ ID NO: 304 - protein, 28 aa, Bacillus cereus
SVSNILLRMRDLANQSANGTNTKGNQAS

SEQ ID NO: 305 - protein, 28 aa, Bacillus thuringiensis
TVTNILQRMRDLAVQSANGTNSNKNRHS

SEQ ID NO: 306 - protein, 28 aa, Bacillus thuringiensis
SVSNILLRMRDIANQSANITNTNENKSA

SEQ ID NO: 307 - protein, 28 aa, Bacillus thuringiensis
SVSNILLRMRDLANQSANGTNTDDNQKA

SEQ ID NO: 308 - protein, 28 aa, Bacillus thuringiensis
SVSNILLRMRDLANQSANGTNTDENKAA

SEQ ID NO: 309 - protein, 28 aa, Bacillus cereus
SVSNILLRMRDIANQSANGTNTDKNQVA

SEQ ID NO: 310 - protein, 28 aa, Bacillus cereus
TVTNILQRMRDVAVQSANGTNSNKNRDS

SEQ ID NO: 311 - protein, 28 aa, Bacillus thuringiensis
SVSNILLRMRDIANQSANGTNTADNQQA

SEQ ID NO: 312 - protein, 28 aa, Bacillus bombysepticus
SVSNILLRMRDLANQSASGTNTDKNQAA

SEQ ID NO: 313 - protein, 28 aa, Bacillus thuringiensis
SVSNILLRMRDLANQSASGTNTDKNQAA

SEQ ID NO: 314 - protein, 28 aa, Bacillus thuringiensis
SVSNILLRMRDLANQSASGTNTDKNQAA

SEQ ID NO: 315 - protein, 28 aa, Bacillus cereus
SVSNILLRMRDLANQSANGTNTGDNQKA

SEQ ID NO: 316 - protein, 28 aa, Bacillus cereus
TNILQRMRDLAVQSANGTNSNKNRDSLN

SEQ ID NO: 317 - protein, 28 aa, Bacillus thuringiensis
TNVLQRMRDVAVQSANGTNLNKNRDSLN

SEQ ID NO: 318 - protein, 28 aa, Bacillus thuringiensis
SVSNILLRMRDIANQSANGTNTDSNKSA

SEQ ID NO: 319 - protein, 28 aa, Bacillus cereus
SVSNILLRMRDLANQSANGTNTAENKAA

SEQ ID NO: 320 - protein, 28 aa, Bacillus thuringiensis
SVSNILLRMRDIANQSANGTNTSDNQKA

SEQ ID NO: 321 - protein, 28 aa, Bacillus thuringiensis
SVSNILLRMRDIANQSANGTNTADNQQA

SEQ ID NO: 322 - protein, 28 aa, Bacillus thuringiensis
TVMNILQRMRDLAVQSANGTNSNKNRDS

SEQ ID NO: 323 - protein, 28 aa, Bacillus thuringiensis
SVSNILLRMRDIANQSANGTNTADNQQA

SEQ ID NO: 324 - protein, 28 aa, Bacillus thuringiensis
TVTNILQHMRDFAIQSANGTNSNTNRDS

SEQ ID NO: 325 - protein, 28 aa, Bacillus thuringiensis
SVSNILLRMRDISNQSANGTNTDKNQSA

SEQ ID NO: 326 - protein, 28 aa, Bacillus thuringiensis
SVSNILLRMRDISNQSANGTNTDKNQSA

SEQ ID NO: 327 - protein, 28 aa, Bacillus thuringiensis
SVSNILLRMRDISNQSANGTNTDKNQSA

SEQ ID NO: 328 - protein, 28 aa, Bacillus thuringiensis
SVSNILLRMRDLANQSANGTNTNENQAA

SEQ ID NO: 329 - protein, 28 aa, Bacillus thuringiensis
SVSNILLRMRDLANQSANGTNTNENQAA

SEQ ID NO: 330 - protein, 28 aa, Bacillus weihenstephanensis
SVSNILLRMRDLSNQSANGTNTDENQQA

SEQ ID NO: 331 - protein, 28 aa, Bacillus thuringiensis
SVSNILLRMRDIANQSANGTNTGDNQKA

SEQ ID NO: 332 - protein, 28 aa, Bacillus thuringiensis
TVANILQRMRDLAVQSSNDTNSNKNRDS

SEQ ID NO: 333 - protein, 28 aa, Bacillus thuringiensis
SVSNILLRMRDLANQSANGTNTDDNQKA

SEQ ID NO: 334 - protein, 28 aa, Bacillus thuringiensis
SVSNILLRMRDLANQSANGTNTDDNQKA

SEQ ID NO: 335 - protein, 28 aa, Bacillus thuringiensis
TVTNILQHMRDFAIQSANGTNSNTNRDS

SEQ ID NO: 336 - protein, 28 aa, Bacillus thuringiensis
SVSNILLRMRDISNQSANGTNTDKNQSA

SEQ ID NO: 337 - protein, 28 aa, Bacillus cereus
TVTNVLQRMRDVAVQSANGTNSSKNRDS

SEQ ID NO: 338 - protein, 28 aa, Bacillus cereus
SVSNILLRMRDIANQSANGTNTDKNQVA

SEQ ID NO: 339 - protein, 28 aa, Bacillus thuringiensis
TVMNILQRMRDLAIQSANSTNSNKNRDS

SEQ ID NO: 340 - protein, 28 aa, Bacillus thuringiensis
SVSNILLRMRDIANQSANGTNTSDNQKA

SEQ ID NO: 341 - protein, 28 aa, Bacillus thuringiensis
SVSNILLRMRDIANQSANGTNTGDNQKA

SEQ ID NO: 342 - protein, 28 aa, Bacillus thuringiensis
SVSNILLRMRDIANQSANGTNTGDNQKA

SEQ ID NO: 343 - protein, 28 aa, Bacillus thuringiensis
SVSNILLRMRDIANQSANGTNTNGNQAA

SEQ ID NO: 344 - protein, 28 aa, Bacillus cereus
SVSNILLRMRDIANQSANGTNTDKNQAA

SEQ ID NO: 345 - protein, 28 aa, Bacillus thuringiensis
SVSNILLRMRDLANQSANGTNTNENQAA

SEQ ID NO: 346 - protein, 28 aa, Bacillus cereus
TVTNVLQRMRDLAVQSANDTNSNKNRDS

SEQ ID NO: 347 - protein, 28 aa, Bacillus cereus
SVSNILLRMRDLANQSANGTNTNENKAA

SEQ ID NO: 348 - protein, 28 aa, Bacillus cereus
SVSNILLRMRDLANQSANGTNTSDNQAA

SEQ ID NO: 349 - protein, 28 aa, Bacillus cereus
SVSNILLRMRDLANQSANGTNTNENKAA

SEQ ID NO: 350 - protein, 28 aa, Bacillus cereus
SVSNILLRMRDLANQSANGTNTNENKAA

SEQ ID NO: 351 - protein, 28 aa, Bacillus cereus
SVSNILLRMRDIANQSANGTNTGDNQKA

SEQ ID NO: 352 - protein, 28 aa, Bacillus thuringiensis
SVSNILLRMRDLANQSASETNTSKNQAA

SEQ ID NO: 353 - protein, 28 aa, Bacillus thuringiensis
SVSNILLRMRDLANQSASETNTSKNQAA

SEQ ID NO: 354 - protein, 28 aa, Bacillus thuringiensis
SVSNILLRMRDIANQSANGTNTGDNQKA

SEQ ID NO: 355 - protein, 28 aa, Bacillus thuringiensis
SVSNILLRMRDLANQSANGTNTSENQAA

SEQ ID NO: 356 - protein, 28 aa, Bacillus cereus
TVTNILQRMRDLAVQSANVTNSNKNRNS

SEQ ID NO: 357 - protein, 28 aa, Bacillus cereus
SVSNILLRMRDLANQSANGTNTDKNQGA

SEQ ID NO: 358 - protein, 28 aa, Bacillus cereus
SVSNILLRMRDLANQSANGTNTDKNQAA

SEQ ID NO: 359 - protein, 28 aa, Bacillus cereus
TVTNVLQRMRDLAVQSANGTNSNKNRDS

SEQ ID NO: 360 - protein, 28 aa, Bacillus thuringiensis
SVSNILLRMRDIANQTANGTNKDTDIEA

SEQ ID NO: 361 - protein, 28 aa, Bacillus cereus
SVSNILLRMRDIANQTANGTNKDTDIEA

SEQ ID NO: 362 - protein, 28 aa, Bacillus thuringiensis
TVMNILQRMRDLAIQSANSTNSNKNRDS

SEQ ID NO: 363 - protein, 28 aa, Bacillus thuringiensis
SVSNILLRMRDIANQSANGTNTGDNQKA

SEQ ID NO: 364 - protein, 28 aa, Bacillus aryabhattai
ETHDILQRMRELVVQAGNGTNKTEDLDA

SEQ ID NO: 365 - protein, 28 aa, Bacillus manliponensis
SVSNILLRMRDLATQSATGTNQGNDRES

SEQ ID NO: 366 - protein, 28 aa, Lysinibacillus sp.
ETHAIVQRMRELAVQAATDTNTDDDRAK

SEQ ID NO: 367 - protein, 28 aa, Lysinibacillus sp.
ETHAIVQRMRELAVQAATDTNTDDDRAK

SEQ ID NO: 368 - protein, 28 aa, Paenibacillus sp.
EIHSMLQRMNELAVQASNGTYSGSDRLN

SEQ ID NO: 369 - protein, 28 aa, Bacillus anthracis
SVSNILLRMRDLANQSANGTNTKENQDA

SEQ ID NO: 370 - protein, 28 aa, Bacillus anthracis
SVSNILTRMRDIAVQSSNGTNTAENQSA

SEQ ID NO: 371 - protein, 28 aa, Bacillus anthracis
SVSNILTRMRDIAVQSSNGTNTAENQSA

SEQ ID NO: 372 - protein, 28 aa, Bacillus anthracis
SVSNILTRMRDIAVQSSNGTNTAENQSA

SEQ ID NO: 373 - protein, 28 aa, Bacillus anthracis
SVSNILTRMRDIAVQSSNGTNTAENQSA

SEQ ID NO: 374 - protein, 28 aa, Bacillus megaterium
ETHDILQRMRELVVQAGNGTNKTEDLDA

SEQ ID NO: 375 - protein, 28 aa, Aneurinibacillus sp.
EIHEMLQRMRELAVQAANGTYSDKDKKA

SEQ ID NO: 376 - protein, 22 aa, Bacillus thuringiensis
AIALGAADDSASNIRKGSSLRD

SEQ ID NO: 377 - protein, 22 aa, Bacillus thuringiensis
AIALGAADDSASNIRKGSSLRD

SEQ ID NO: 378 - protein, 21 aa, Bacillus thuringiensis
AIALGAADDASNIRKGSSLRD

SEQ ID NO: 379 - protein, 22 aa, Bacillus cereus
AIALGAADDSASNIRKGSSLRD

SEQ ID NO: 380 - protein, 21 aa, Bacillus thuringiensis
VIANAPNDSANNLKKGTALHE

SEQ ID NO: 381 - protein, 22 aa, Bacillus thuringiensis
TAIAGAADDSANNIRKGSSLRD

SEQ ID NO: 382 - protein, 22 aa, Bacillus thuringiensis
AIALGAADDSANNIRKGSSLRD

SEQ ID NO: 383 - protein, 22 aa, Bacillus thuringiensis
AIALGAADDSANNIRKGSSLRD

SEQ ID NO: 384 - protein, 22 aa, Bacillus cereus
AIALGAADDSANNIRKGSSLRD

SEQ ID NO: 385 - protein, 22 aa, Bacillus cereus
VIAVNAPNDSAHNLKKGTALHE

SEQ ID NO: 386 - protein, 22 aa, Bacillus thuringiensis
AIALGAADDSANNIRKGSSLRD

SEQ ID NO: 387 - protein, 22 aa, Bacillus bombysepticus
AIALGAADDSANNIRKGSSLRD

SEQ ID NO: 388 - protein, 22 aa, Bacillus thuringiensis
AIALGAADDSANNIRKGSSLRD

SEQ ID NO: 389 - protein, 22 aa, Bacillus thuringiensis
AIALGAADDSANNIRKGSSLRD

SEQ ID NO: 390 - protein, 22 aa, Bacillus cereus
AIALGAADDSANNIRKGSSLRD

SEQ ID NO: 391 - protein, 22 aa, Bacillus cereus
VIAINAPNDASNNLKKGTALHE

SEQ ID NO: 392 - protein, 21 aa, Bacillus thuringiensis
VIANAPNDSAHNLKKGTALHE

SEQ ID NO: 393 - protein, 22 aa, Bacillus thuringiensis
AIALGAADDSANNIRKGSSLRD

SEQ ID NO: 394 - protein, 22 aa, Bacillus cereus
AIALGAADDSANNIRKGSSLRD

SEQ ID NO: 395 - protein, 22 aa, Bacillus thuringiensis
AIALGAADDSANNIRKGSSLRD

SEQ ID NO: 396 - protein, 22 aa, Bacillus thuringiensis
AIALGAADDSANNIRKGSSLRD

SEQ ID NO: 397 - protein, 21 aa, Bacillus thuringiensis
VIANAPNDSAHNLKKGTAFHE

SEQ ID NO: 398 - protein, 21 aa, Bacillus thuringiensis
AIALGAADDSANNRKGSSLRD

SEQ ID NO: 399 - protein, 22 aa, Bacillus thuringiensis
VIVINAPNDSAHNLKKGTALHE

SEQ ID NO: 400 - protein, 22 aa, Bacillus thuringiensis
AIALGAADDSANNIRKGSSLRD

SEQ ID NO: 401 - protein, 22 aa, Bacillus thuringiensis
AIALGAADDSANNIRKGSSLRD

SEQ ID NO: 402 - protein, 22 aa, Bacillus thuringiensis
AIALGAADDSANNIRKGSSLRD

SEQ ID NO: 403 - protein, 22 aa, Bacillus thuringiensis
AIALGAADDSANNIRKGSSLRD

SEQ ID NO: 404 - protein, 22 aa, Bacillus thuringiensis
AIALGAADDSANNIRKGSSLRD

SEQ ID NO: 405 - protein, 22 aa, Bacillus weihenstephanensis
AIALGAADDSANNIRKGSSLRD

SEQ ID NO: 406 - protein, 22 aa, Bacillus thuringiensis
AIALGAADDSANNIRKGSSLRD

SEQ ID NO: 407 - protein, 21 aa, Bacillus thuringiensis
VIANAPNDSAHNLKKGTALHE

SEQ ID NO: 408 - protein, 22 aa, Bacillus thuringiensis
AIALGAADDSANNIRKGSSLRD

SEQ ID NO: 409 - protein, 22 aa, Bacillus thuringiensis
AIALGAADDSANNIRKGSSLRD

SEQ ID NO: 410 - protein, 22 aa, Bacillus thuringiensis
VIVINAPNDASHNLKKGTALHE

SEQ ID NO: 411 - protein, 22 aa, Bacillus thuringiensis
AIALGAADDSANNIRKGSSLRD

SEQ ID NO: 412 - protein, 22 aa, Bacillus cereus
VIAVANPNNSAHNLKKGTALHE

SEQ ID NO: 413 - protein, 22 aa, Bacillus cereus
AIALGAADDSANNIRKGSSLRD

SEQ ID NO: 414 - protein, 21 aa, Bacillus thuringiensis
VIANAPNDSAHNLKKGTALHE

SEQ ID NO: 415 - protein, 22 aa, Bacillus thuringiensis
AIALGAADDSANNIRKGSSLRD

SEQ ID NO: 416 - protein, 22 aa, Bacillus thuringiensis
AIALGAADDSANNIRKGSSLRD

SEQ ID NO: 417 - protein, 22 aa, Bacillus thuringiensis
AIALGAADDSANNIRKGSSLRD

SEQ ID NO: 418 - protein, 22 aa, Bacillus thuringiensis
AIALGAADDSANNIRKGSSLRD

SEQ ID NO: 419 - protein, 22 aa, Bacillus cereus
AIALGAADDSANNIRKGSSLRD

SEQ ID NO: 420 - protein, 22 aa, Bacillus thuringiensis
AIALGAADDASNNIRKGSSLRD

SEQ ID NO: 421 - protein, 21 aa, Bacillus cereus
VIANAPNDSANNLKKGTALHE

SEQ ID NO: 422 - protein, 22 aa, Bacillus cereus
AIALGAADDSANNIRKGSSLRD

SEQ ID NO: 423 - protein, 22 aa, Bacillus cereus
AIALGAADDSANNIRKGSSLRD

SEQ ID NO: 424 - protein, 22 aa, Bacillus cereus
AIALGAADDSANNIRKGSSLRD

SEQ ID NO: 425 - protein, 22 aa, Bacillus cereus
AIALGAADDSANNIRKGSSLRD

SEQ ID NO: 426 - protein, 22 aa, Bacillus cereus
AIALGAADDSANNIRKGSSLRD

SEQ ID NO: 427 - protein, 22 aa, Bacillus thuringiensis
AIALGAADDSANNIRKGSSLRD

SEQ ID NO: 428 - protein, 21 aa, Bacillus thuringiensis
AIALGAADDANNIRKGSSLRD

SEQ ID NO: 429 - protein, 22 aa, Bacillus thuringiensis
AIALGAADDSANNIRKGSSLRD

SEQ ID NO: 430 - protein, 22 aa, Bacillus thuringiensis
AIALGAADDSANNIRKGSSLRD

SEQ ID NO: 431 - protein, 22 aa, Bacillus cereus
VIAINAPNNSAHNLKKGTALHE

SEQ ID NO: 432 - protein, 22 aa, Bacillus cereus
AIALGAADDSANNIRKGSSLRD

SEQ ID NO: 433 - protein, 22 aa, Bacillus cereus
AIALGAADDSANNIRKGSSLRD

SEQ ID NO: 434 - protein, 22 aa, Bacillus cereus
VIAINAPNDSANNLKKGTALHE

SEQ ID NO: 435 - protein, 22 aa, Bacillus thuringiensis
AIALGAADDSANNIRKGSSLRD

SEQ ID NO: 436 - protein, 21 aa, Bacillus cereus
AIALGAADDANNIRKGSSLRD

SEQ ID NO: 437 - protein, 21 aa, Bacillus thuringiensis
VIANAPNDSAHNLKKGTALHE

SEQ ID NO: 438 - protein, 22 aa, Bacillus thuringiensis
AIALGAADDSANNIRKGSSLRD

SEQ ID NO: 439 - protein, 22 aa, Bacillus aryabhattai
SIALGAADDSASNIRQGSSLKE

SEQ ID NO: 440 - protein, 22 aa, Bacillus manliponensis
AIALGAADDSASNIQKGSSLRN

SEQ ID NO: 441 - protein, 22 aa, Lysinibacillus sp.
SIALGAADDAASNIRYGSSLRL

SEQ ID NO: 442 - protein, 22 aa, Lysinibacillus sp.
SIALGAADDAASNIRYGSSLRL

SEQ ID NO: 443 - protein, 22 aa, Paenibacillus sp.
SIAGLAADDSAGNIRLGSSLKG

SEQ ID NO: 444 - protein, 22 aa, Bacillus anthracis
AIALGAADDSANNIRKGSSLRD

SEQ ID NO: 445 - protein, 22 aa, Bacillus anthracis
AIALGAADDAASNIRKGSSLRN

SEQ ID NO: 446 - protein, 22 aa, Bacillus anthracis
AIALGAADDAASNIRKGSSLRN

SEQ ID NO: 447 - protein, 22 aa, Bacillus anthracis
AIALGAADDAASNIRKGSSLRN

SEQ ID NO: 448 - protein, 22 aa, Bacillus anthracis
AIALGAADDAASNIRKGSSLRN

SEQ ID NO: 449 - protein, 22 aa, Bacillus megaterium
SIALGAADDSASNIRQGSSLKE

SEQ ID NO: 450 - protein, 22 aa, Aneurinibacillus sp.
SIALGAADDSARNIRYGSSLRE

SEQ ID NO: 451 - protein, 28 aa, Bacillus thuringiensis
SAQNGKTNTGNASQNALDRMRLLINSVS

SEQ ID NO: 452 - protein, 28 aa, Bacillus thuringiensis
SAQNGKTNTGNASQNALDRMRLLINSVS

SEQ ID NO: 453 - protein, 28 aa, Bacillus thuringiensis
SAQNGKTNTGNASQNALDRMRLLINSVS

SEQ ID NO: 454 - protein, 28 aa, Bacillus cereus
SAQNGKTNTGNASQNALDRMRLLINSVS

SEQ ID NO: 455 - protein, 28 aa, Bacillus thuringiensis
SHRNKNSNTGNASQVALDRMRQLINTVT

SEQ ID NO: 456 - protein, 28 aa, Bacillus thuringiensis
ASKNENTNTGNASQNAIDRMRLLINSVS

SEQ ID NO: 457 - protein, 28 aa, Bacillus thuringiensis
AKQNDDTNTGNASQNALDRMRLLINSVS

SEQ ID NO: 458 - protein, 28 aa, Bacillus thuringiensis
AAKNEDTNTGNASQNALDRMRLLINSVS

SEQ ID NO: 459 - protein, 29 aa, Bacillus cereus
LAVQNKDTNTGNASQNAIDRMRLLINSVS

SEQ ID NO: 460 - protein, 28 aa, Bacillus cereus
SDRNKNSNTGNASQVAVDRMRQLINTVT

SEQ ID NO: 461 - protein, 28 aa, Bacillus thuringiensis
AQQNDATNTGNASQNAIDRMRLLINSVS

SEQ ID NO: 462 - protein, 28 aa, Bacillus bombysepticus
AAQNKDTNTGSASQNALDRMRLLINSVS

SEQ ID NO: 463 - protein, 28 aa, Bacillus thuringiensis
AAQNKDTNTGSASQNALDRMRLLINSVS

SEQ ID NO: 464 - protein, 28 aa, Bacillus thuringiensis
AAQNKDTNTGSASQNALDRMRLLINSVS

SEQ ID NO: 465 - protein, 28 aa, Bacillus cereus
AKQNDGTNTGNASQNALDRMRLLINSVS

SEQ ID NO: 466 - protein, 28 aa, Bacillus cereus
NLSDRNKNSNTGNASQVALDRMRQLINT

SEQ ID NO: 467 - protein, 28 aa, Bacillus thuringiensis
NLSDRNKNLNTGNASQVAVDRMRQLVNT

SEQ ID NO: 468 - protein, 28 aa, Bacillus thuringiensis
ASKNSDTNTGNASQNAIDRMRLLINSVS

SEQ ID NO: 469 - protein, 28 aa, Bacillus cereus
AAKNEATNTGNASQNALDRMRLLINSVS

SEQ ID NO: 470 - protein, 28 aa, Bacillus thuringiensis
AKQNDSTNTGNASQNAIDRMRLLINSVS

SEQ ID NO: 471 - protein, 28 aa, Bacillus thuringiensis
AQQNDATNTGNASQNAIDRMRLLINSVS

SEQ ID NO: 472 - protein, 28 aa, Bacillus thuringiensis
SDRNKNSNTGNASQVALDRMRQLINMVT

SEQ ID NO: 473 - protein, 28 aa, Bacillus thuringiensis
AQQNDATNTGNASQNAIDRMRLLINSVS

SEQ ID NO: 474 - protein, 28 aa, Bacillus thuringiensis
SDRNTNSNTGNASQIAFDRMHQLINTVT

SEQ ID NO: 475 - protein, 28 aa, Bacillus thuringiensis
ASQNKDTNTGNASQNSIDRMRLLINSVS

SEQ ID NO: 476 - protein, 28 aa, Bacillus thuringiensis
ASQNKDTNTGNASQNSIDRMRLLINSVS

SEQ ID NO: 477 - protein, 28 aa, Bacillus thuringiensis
ASQNKDTNTGNASQNSISRMRLLINSVS

SEQ ID NO: 478 - protein, 28 aa, Bacillus thuringiensis
AAQNENTNTGNASQNALDRMRLLINSVS

SEQ ID NO: 479 - protein, 28 aa, Bacillus thuringiensis
AQQNEDTNTGNASQNSLDRMRLLINSVS

SEQ ID NO: 480 - protein, 28 aa, Bacillus weihenstephanensis
AQQNEDTNTGNASQNSLDRMRLLINSVS

SEQ ID NO: 481 - protein, 28 aa, Bacillus thuringiensis
AKQNDGTNTGNASQNAIDRMRLLINSVS

SEQ ID NO: 482 - protein, 28 aa, Bacillus thuringiensis
SDRNKNSNTDNSSQVALDRMRQLINAVT

SEQ ID NO: 483 - protein, 28 aa, Bacillus thuringiensis
AKQNDDTNTGNASQNALDRMRLLINSVS

SEQ ID NO: 484 - protein, 28 aa, Bacillus thuringiensis
AKQNDDTNTGNASQNALDRMRLLINSVS

SEQ ID NO: 485 - protein, 28 aa, Bacillus thuringiensis
SDRNTNSNTGNASQIAFDRMHQLINTVT

SEQ ID NO: 486 - protein, 28 aa, Bacillus thuringiensis
ASQNKDTNTGNASQNSIDRMRLLINSVS

SEQ ID NO: 487 - protein, 28 aa, Bacillus cereus
SDRNKSSNTGNASQVAVDRMRQLVNTVT

SEQ ID NO: 488 - protein, 27 aa, Bacillus cereus
AVQKDTNTGNASQNAIDRMRLLINSVS

SEQ ID NO: 489 - protein, 28 aa, Bacillus thuringiensis
SDRNKNSNTSNASQIALDRMRQLINMVT

SEQ ID NO: 490 - protein, 28 aa, Bacillus thuringiensis
AKQNDSTNIGNASQNAIDRMRLLINSVS

SEQ ID NO: 491 - protein, 28 aa, Bacillus thuringiensis
AKQNDGTNTFNASQNAIDRMRLLINSVS

SEQ ID NO: 492 - protein, 28 aa, Bacillus thuringiensis
AKQNDGTNTFNASQNAIDRMRLLINSVS

SEQ ID NO: 493 - protein, 28 aa, Bacillus thuringiensis
AAQNGNTNTFNASQNAIDRMRLLINSVS

SEQ ID NO: 494 - protein, 28 aa, Bacillus cereus
AAQNKDTNTGNASQNAIDRMRLLINSVS

SEQ ID NO: 495 - protein, 28 aa, Bacillus thuringiensis
AAQNENTNTGNASQNALDRMRLLINSVS

SEQ ID NO: 496 - protein, 28 aa, Bacillus cereus
SDRNKNSNTDNASQVALDRMRQLVNTVT

SEQ ID NO: 497 - protein, 28 aa, Bacillus cereus
AAKNENTNTGNASQNALDRMRLLINSVS

SEQ ID NO: 498 - protein, 28 aa, Bacillus cereus
AAQNDSTNTGNASQNALDRMRLLINSVS

SEQ ID NO: 499 - protein, 28 aa, Bacillus cereus
AAKNENTNTGNASQNALDRMRLLINSVS

SEQ ID NO: 500 - protein, 28 aa, Bacillus cereus
AAKNENTNTGNASQNALDRMRLLINSVS

SEQ ID NO: 501 - protein, 28 aa, Bacillus cereus
AKQNDGTNTGNASQNAIDRMRLLINSVS

SEQ ID NO: 502 - protein, 28 aa, Bacillus thuringiensis
AAQNKSTNTESASQNALDRMRLLINSVS

SEQ ID NO: 503 - protein, 28 aa, Bacillus thuringiensis
AAQNKSTNTESASQNALDRMRLLINSVS

SEQ ID NO: 504 - protein, 28 aa, Bacillus thuringiensis
AKQNDGTNTGNASQNAIDRMRLLINSVS

SEQ ID NO: 505 - protein, 27 aa, Bacillus thuringiensis
AAQNESTNTGNAQNALDRMRLLINSVS

SEQ ID NO: 506 - protein, 28 aa, Bacillus cereus
SNRNKNSNTVNASQVALDRMRQLINTVT

SEQ ID NO: 507 - protein, 27 aa, Bacillus cereus
AGQNKDTNTNASQNALDRMRLLINSVS

SEQ ID NO: 508 - protein, 28 aa, Bacillus cereus
AAQNKDTNTGNASQNALDRMRLLINSVS

SEQ ID NO: 509 - protein, 28 aa, Bacillus cereus
SDRNKNSNTGNASQVALDRMRQLVNTVT

SEQ ID NO: 510 - protein, 28 aa, Bacillus thuringiensis
AEIDTDKNTGNATQNAIDRMRLLINSVS

SEQ ID NO: 511 - protein, 28 aa, Bacillus cereus
AEIDTDKNTGNATQNAIDRMRLLINSVS

SEQ ID NO: 512 - protein, 27 aa, Bacillus thuringiensis
SDRNKNSNTSNASQIALDRMRQLINMT

SEQ ID NO: 513 - protein, 28 aa, Bacillus thuringiensis
AKQNDGTNTGNASQNAIDRMRLLINSVS

SEQ ID NO: 514 - protein, 28 aa, Bacillus aryabhattai
ADLDETKNTGNGAQVVLERMRQLIDHTE

SEQ ID NO: 515 - protein, 27 aa, Bacillus manliponensis
SERDNGQNTGTAQTALDRMRLLINSVS

SEQ ID NO: 516 - protein, 28 aa, Lysinibacillus sp.
KARDDDTNTDTAAQVALERMRQVIAHTE

SEQ ID NO: 517 - protein, 28 aa, Lysinibacillus sp.
KARDDDTNTDTAAQVALERMRQVIAHTE

SEQ ID NO: 518 - protein, 28 aa, Paenibacillus sp.
NLRDSGSYTGNSAQVALENMRQLMSHIE

SEQ ID NO: 519 - protein, 28 aa, Bacillus anthracis
ADQNEKTNTGNASQNALDRMRLLINSVS

SEQ ID NO: 520 - protein, 28 aa, Bacillus anthracis
ASQNEATNTGNSSQVAIDRMRTLINSVS

SEQ ID NO: 521 - protein, 28 aa, Bacillus anthracis
ASQNEATNTGNSSQVAIDRMRTLINSVS

SEQ ID NO: 522 - protein, 28 aa, Bacillus anthracis
ASQNEATNTGNSSQVAIDRMRTLINSVS

SEQ ID NO: 523 - protein, 28 aa, Bacillus anthracis
ASQNEATNTGNSSQVIADRMRTLINSVS

SEQ ID NO: 524 - protein, 28 aa, Bacillus megaterium
ADLDETKNTGNGAQVVLERMRQLIDHTE

SEQ ID NO: 525 - protein, 27 aa, Aneurinibacillus sp.
AKKDKSYTGNAAQVALERMRQLMEHIE

SEQ ID NO: 526 - protein, 22 aa, Escherichia coli
ERLSSGLRINSAKDDAAGQAIA

SEQ ID NO: 527 - protein, 22 aa, Escherichia coli
AIAQGAADDKASNIRLGSSLRE

SEQ ID NO: 528 - protein, 15 aa, Escherichia coli
RINSAKDDAAGQAIA

SEQ ID NO: 529 - protein, 15 aa, Escherichia coli
AIAQGAADDKASNIR

SEQ ID NO: 530 - protein, 22 aa, Pseudomonas aeruginosa
QRLSTGSRINSAKDDAAGLQIA

SEQ ID NO: 531 - protein, 22 aa, Pseudomonas aeruginosa
AIQLGAADDKASNIRSGTSLRQ

SEQ ID NO: 532 - protein, 22 aa, Xanthomonas spp.
QRLSSGLRINSAKDDAAGLAIS

SEQ ID NO: 533 - protein, 22 aa, Xanthomonas spp.
SIALGAADDKASNIRLGSSLRQ

SEQ ID NO: 534 - protein, 22 aa, Erwinia amylovora
QRLSSGLRINSAKDDAAGQAIS

SEQ ID NO: 535 - protein, 22 aa, Erwinia amylovora
SIAQGAADDKASNIRLGSSLRQ

SEQ ID NO: 536 - protein, 22 aa, Burkholderia phytofirmans
TRLSSGKRINSAADDAAGLAIS

SEQ ID NO: 537 - protein, 22 aa, Burkholderia phytofirmans
SIALGAADDAASNIRKGSSLRT

SEQ ID NO: 538 - protein, 22 aa, Burkholderia ubonensis
NRLSSGKRINTAADDAAGLAIS

SEQ ID NO: 539 - protein, 22 aa, Burkholderia ubonensis
SIALGAADDAATNIRKGSSLRN

SEQ ID NO: 540 - protein, 22 aa, Pseudomonas syringae
TRLSSGLKINSAKDDAAGLQIA

SEQ ID NO: 541 - protein, 22 aa, Pseudomonas syringae
AIQLGAADDKASNIKLGSSLRT

SEQ ID NO: 542 - protein, 4 aa, Artificial Sequence
  Synthetic construct
GFLN

SEQ ID NO: 543 - protein, 5 aa, Artificial Sequence
  Synthetic construct
WGFLI

SEQ ID NO: 544 - protein, 5 aa, Artificial Sequence
  Synthetic construct
MGVLN

SEQ ID NO: 545 - protein, 4 aa, Artificial Sequence
  Synthetic construct
GVLN

SEQ ID NO: 546 - protein, 5 aa, Artificial Sequence
  Synthetic construct
WGFFY

SEQ ID NO: 547 - protein, 9 aa, Artificial Sequence
  Synthetic construct
LVPFAVWLA

SEQ ID NO: 548 - protein, 5 aa, Artificial Sequence
  Synthetic construct
AVWLA

SEQ ID NO: 549 - protein, 12 aa, Artificial Sequence
  Synthetic construct
LLGTADKKIKIQ

SEQ ID NO: 550 - protein, 11 aa, Artificial Sequence
  Synthetic construct
LLKSTQEIKIQ

SEQ ID NO: 551 - protein, 11 aa, Artificial Sequence
  Synthetic construct
LLNEDSEVKIQ

SEQ ID NO: 552 - protein, 9 aa, Artificial Sequence
  Synthetic construct
LGVAANNTQ

SEQ ID NO: 553 - protein, 10 aa, Artificial Sequence
  Synthetic construct
LLRMRDLANQ

SEQ ID NO: 554 - protein, 10 aa, Artificial Sequence
  Synthetic construct
LQRMRDVAVQ

SEQ ID NO: 555 - protein, 10 aa, Artificial Sequence
  Synthetic construct
LLRMRDISNQ

SEQ ID NO: 556 - protein, 10 aa, Artificial Sequence
  Synthetic contstruct
LLRMRDIANQ

SEQ ID NO: 557 - protein, 13 aa, Artificial Sequence
  Synthetic construct
LQKQIDYIAGNTQ

SEQ ID NO: 558 - protein, 8 aa, Artificial Sequence
  Synthetic construct
LLIRLPLD

SEQ ID NO: 559 - protein, 9 aa, Artificial Sequence
  Synthetic construct
QRMRELAVQ

SEQ ID NO: 560 - protein, 9 aa, Artificial Sequence
  Synthetic construct
TRMRDIAVQ

SEQ ID NO: 561 - protein, 9 aa, Artificial Sequence
  Synthetic construct
TRMRDIAVQ

SEQ ID NO: 562 - protein, 9 aa, Artificial Sequence
  Synthetic construct
QRMRELVVQ

SEQ ID NO: 563 - protein, 6 aa, Artificial Sequence
  Synthetic construct
LGATLN

SEQ ID NO: 564 - protein, 6 aa, Artificial Sequence
  Synthetic construct
LGATQN

SEQ ID NO: 565 - protein, 6 aa, Artificial Sequence
  Synthetic construct
LAQANQ

SEQ ID NO: 566 - protein, 6 aa, Artificial Sequence
  Synthetic construct
LGAMIN

SEQ ID NO: 567 - protein, 6 aa, Artificial Sequence
  Synthetic construct
LGSMIN

SEQ ID NO: 568 - protein, 6 aa, Artificial Sequence
  Synthetic construct
MGAYQN

SEQ ID NO: 569 - protein, 6 aa, Artificial Sequence
  Synthetic construct
LGAYQN

SEQ ID NO: 570 - protein, 6 aa, Artificial Sequence
  Synthetic construct
YGSQLN

SEQ ID NO: 571 - protein, 22 aa, Bacillus thuringiensis
DRLSSGKRINSAKDDAAGLAIA

SEQ ID NO: 572 - protein, 22 aa, Bacillus thuringiensis
DRLSSGKRINSASDDAAGLQIA

SEQ ID NO: 573 - protein, 22 aa, Bacillus thuringiensis
QRLSSGKRINSASDDAAGLAIA

SEQ ID NO: 574 - protein, 22 aa, Bacillus thuringiensis
NRLSSGKRINSASDDAAGLAIA

SEQ ID NO: 575 - protein, 22 aa, Caballeronia megalochromosomata
TRLSSGKRINSASDDAAGLAIA

SEQ ID NO: 576 - protein, 22 aa, Bacillus thuringiensis
DRLSSGYRINSASDDAAGLAIA

SEQ ID NO: 577 - protein, 22 aa, Bacillus thuringiensis
DRLSSGFRINSASDDAAGLAIA

SEQ ID NO: 578 - protein, 22 aa, Bacillus thuringiensis
DRLSSGKRINSASDDPAGLAIA

SEQ ID NO: 579 - protein, 22 aa, Bacillus thuringiensis
DRLSSGQRINSASDDAAGLAIA

SEQ ID NO: 580 - protein, 22 aa, Lysinibacillus spp.
EKLSSGLRINRAGDDAAGLAIS

SEQ ID NO: 581 - protein, 22 aa, Lysinibacillus spp.
EKLSSGYKINRASDDAAGLAIS

SEQ ID NO: 582 - protein, 22 aa, Lysinibacillus spp.
LRISSGYRINSAADDPAGLAIS

SEQ ID NO: 583 - protein, 22 aa, Lysinibacillus fusiformis
LRISTGYRINSAADDPAGLAIS

SEQ ID NO: 584 - protein, 22 aa, Lysinibacillus macroides
EKLSSGFRINRAGDDAAGLAIS

SEQ ID NO: 585 - protein, 22 aa, Lysinibacillus xylanilyticus
EKLSSGYKINRAGDDAAGLAIS

SEQ ID NO: 586 - protein, 15 aa, Bacillus thuringiensis
AIALGAADDKASNIR

SEQ ID NO: 587 - protein, 28 aa, Pseudomonas syringae
ESTNILQRMRELAVQSRNDSNSATDREA

SEQ ID NO: 588 - protein, 28 aa, Pseudomonas syringae
AERDTASNSDNRSQVALERMRQLINTSE

SEQ ID NO: 589 - protein, 22 aa, Bacillus thuringiensis
DRLSSGKRINSASDPAAGLAIA

SEQ ID NO: 590 - protein, 15 aa, Bacillus thuringiensis
RINSAKDDAAGLAIA

SEQ ID NO: 591 - protein, 8 aa, Bacillus thuringiensis
RINSASDD

SEQ ID NO: 592 - protein, 8 aa, Bacillus thuringiensis
RINNASDD

SEQ ID NO: 593 - protein, 8 aa, Bacillus manliponensis
QINSASDD

SEQ ID NO: 594 - protein, 8 aa, Lysinibacillus sp.
RINSAADD

SEQ ID NO: 595 - protein, 8 aa, Paenibacillus sp.
RINGASDD

SEQ ID NO: 596 - protein, 8 aa, Aneurinibacillus sp.
RINRASDD

SEQ ID NO: 597 - protein, 8 aa, Escherichia coli
RINSAKDD

SEQ ID NO: 598 - protein, 8 aa, Burkholderia ubonensis
RINTAADD

SEQ ID NO: 599 - protein, 8 aa, Pseudomonas syringae
KINSAKDD

SEQ ID NO: 600 - protein, 8 aa, Lysinibacillus spp.
RINRAGDD

SEQ ID NO: 601 - protein, 8 aa, Lysinibacillus spp.
KINRASDD

SEQ ID NO: 602 - protein, 8 aa, Lysinibacillus xylanilyticus
KINRAGDD

SEQ ID NO: 603 - protein, 8 aa, Bacillus thuringiensis
  MISC_FEATURE (1)..(1): Xaa = Arg or Gln or Lys
  MISC_FEATURE (4)..(4): Xaa = Ser or Asn or Gly or Arg or Thr
  MISC_FEATURE (6)..(6): Xaa = Ser or Ala or Lys or Gly
XINXAXDD

SEQ ID NO: 604 - protein, 12 aa, Glycine max
GGIRAAPTGNER

SEQ ID NO: 605 - protein, 12 aa, Glycine max
RENGTPAARIGG

SEQ ID NO: 606 - protein, 217 aa, Glycine max
MKSTIFFALFLFCAFTTSYLPSAIADFVLDNEGNPLENGGTYYILSDITAFGGIRAAPTGNERCPLTVVQSRNELDKGIETIISSPYRIRFIAEGHPLSLKFDSFAVIMLCVGIPTEWSVVEDLPEGPAVKIGENKDAMDGWFRLERVSDDEFNNYKLVFCPQQAEDDKCGDIGISIDHDDGTRRLVVSKNKPLVVQFQKLDKESLAKKNHGLSRSE

SEQ ID NO: 607 - protein, 12 aa, Glycine max
GGIRATPTENER

SEQ ID NO: 608 - protein, 12 aa, Glycine max
GGIRVAATGKER

SEQ ID NO: 609 - protein, 12 aa, Glycine max
RENETPTARIGG

SEQ ID NO: 610 - protein, 12 aa, Glycine max
REKGTAAVRIGG

SEQ ID NO: 611 - protein, 54 aa, Artificial Sequence
  Synthetic construct
MSTATFVDIIIAILLPPLGVFLRFGCGVEFWICLVLTLLGYIPGIIYAIYVLTK

SEQ ID NO: 612 - protein, 54 aa, Citrus clementina
MGSETFLEVILAILLPPVGVFLRYGCGVEFWICLLLTVLGYIPGIIYAIYVLVG

SEQ ID NO: 613 - protein, 54 aa, Citrus trifoliata
MGTATCVDIILAVILPPLGVFLKFGCKAEFWICLLLTILGYIPGIIYAVYVITK

SEQ ID NO: 614 - protein, 58 aa, Citrus sinensis
MADEGTATCIDIILAIILPPLGVFLKFGCKVEFWICLLLTIFGYIPGIIYAVYAITKN

SEQ ID NO: 615 - protein, 58 aa, Citrus sinensis
MADGSTATCVDILLAVILPPLGVFLKFGCKAEFWICLLLTILGYIPGIIYAVYAITKK

SEQ ID NO: 616 - protein, 104 aa, Citrus clementina
FYKQKYQVQITKAVTQNPKHFFNQSSCFLTLNFILFHFTLFKNQSKMADGSTATCVDILLAVILPPLGVFLKFGCKAEFWICLLLTILGYIPGIIYAVYAITKK

SEQ ID NO: 617 - protein, 54 aa, Arabidopsis thaliana; identical to SEQ ID NO: 611

SEQ ID NO: 618 - protein, 54 aa, Camelina sativa
MSTATFVDIIIAVLLPPLGVFLRFGCGVEFWICLVLTLLGYIPGIIYAIYVLTK

SEQ ID NO: 619 - protein, 54 aa, Arabidopsis lyrata
MGTATCVDIIIAILLPPLGVFLRFGCGVEFWICLVLTLLGYIPGILYALYVLTK

SEQ ID NO: 620 - protein, 52 aa, Artificial Sequence
  Synthetic construct
RTCESQSHRFKGPCSRDSNCATVCLTEGFSGGDCRGFRRRCRCTRPCVFDEK

SEQ ID NO: 621 - protein, 47 aa, Citrus sinensis
RVCQSQSHHFHGACFSHHNCAFVCRNEGFSGGKCRGVRRRCFCSKLC

SEQ ID NO: 622 - protein, 46 aa, Avena sativa
KSCCKDIMARNCYNVCRIPGTPRPVCATTCRCKIISGNKCPKDYPK

SEQ ID NO: 623 - protein, 52 aa, Artificial Sequence; identical to SEQ ID NO: 620
  Synthetic construct

SEQ ID NO: 624 - protein, 75 aa, Citrus sinensis
MDSRSFGLLPLLLLILLTSQMTVLQTEARLCESQSHRFHGTCVRSHNCDLVCRTEGFTGGRCRGFRRRCFCTRIC

SEQ ID NO: 625 - protein, 73 aa, Citrus paradise
MKSFFGIFLLLLILFASQEIMVPAEGRVCQSQSHHFHGACFSHHNCAFVCRNEGFSGGKCRGVRRRCFCSKLC

SEQ ID NO: 626 - protein, 72 aa, Citrus clementina
MKSFFGIFLLLLILFASQMMVPAEGRVCQSQSHHFHGACFSHHNCAFVCRNEGFSGGKCRGARRRCFCSKLC

SEQ ID NO: 627 - protein, 73 aa, Citrus clementina
MKSFFGIFLLLLILFASQEMMVPAEGRVCQSQSHHFHGACFSHHNCAFVCRNEGFSGGKCRGARRRCFCSKLC

SEQ ID NO: 628 - protein, 72 aa, Citrus clementina; identical to SEQ ID NO: 626

SEQ ID NO: 629 - protein, 78 aa, Nicotiana benthamiana
MANSMRFFATVLLLALLVMATEMGPMTIAEARTCESQSHRFKGPCSRDSNCATVCLTEGFSGGDCRGFRRRCFCTRPC

SEQ ID NO: 630 - protein, 78 aa, Nicotiana sylvestris
MAKSMRFFATVLLLALLVMATEMGPTTIAEARTCESQSHRFKGPCSRDSNCATVCLTEGFSGGDCRGFRRRCFCTRPC

SEQ ID NO: 631 - protein, 78 aa, Nicotiana tabacum
MANSMRFFATVLLLTLLVMATEMGPMTIAEARTCESQSHRFKGPCSRDSNCATVCLTEGFSGGDCRGFRRRCFCTRPC

SEQ ID NO: 632 - protein, 78 aa, Nicotiana tomentosiformis
MANSMRFFATVLLIALLVMATEMGPMTIAEARTCESQSHRFKGPCSRDSNCATVCLTEGFSGGDCRGFRRRCFCTRPC

SEQ ID NO: 633 - protein, 78 aa, Nicotiana tabacum
MANSMRFFATVLLIALLVTATEMGPMTIAEARTCESQSHRFKGPCSRDSNCATVCLTEGFSGGDCRGFRRRCFCTRPC

SEQ ID NO: 634 - protein, 78 aa, Nicotiana alata
MANSMRFFATVLLLTLLFMATEMGPMTIAEARTCESQSHRFKGPCARDSNCATVCLTEGFSGGDCRGFRRRCFCTRPC

SEQ ID NO: 635 - protein, 80 aa, Avena sativa
MGSIKGLKSVVICVLVLGIVLEQVQVEGKSCCKDIMARNCYNVCRIPGTPRPVCATTCRCKIISGNKCPKDYPKLHGDPD

SEQ ID NO: 636 - protein, 80 aa, Avena sativa
MGSIKGLKSVVICVLVLGIVLEHVQVEGKSCCKDTTARNCYNVCRIPGTPRPVCATTCRCKIISGNKCPKDYPKLHGDLD

SEQ ID NO: 637 - protein, 112 aa, Tulipa gesneriana
LGLVVAQTQVDAKSCCPSTAARNCYNVCRFPGTPRPVCAATCGCKIITGTKCPPDYPKLGWSTFQNSDVADKALDVVDEALHVAKEVMKEAVERCNNACSEVCTKGSYAVTA

SEQ ID NO: 638 - protein, 75 aa, Vitis vinifera
MERKSLGFFFFLLLILLASQEMVVPSEARVCESQSHKFEGACMGDHNCALVCRNEGFSGGKCKGLRRRCFCTKLC

SEQ ID NO: 639 - protein, 74 aa, Vitis vinifera
MERKSLGFFFFLLLILLASQMVVPSEARVCESQSHKFEGACMGDHNCALVCRNEGFSGGKCKGLRRRCFCTKLC

SEQ ID NO: 640 - protein, 76 aa, Citrus sinensis
MERSVRLFSTVLLVLLLLASEMGLRAAEARICESQSHRFKGPCVSKSNCAAVCQTEGFHGGHCRGFRRRCFCTKRC

SEQ ID NO: 641 - protein, 50 aa, Aesculus hippocastanum
LCNERPSQTWSGNCGNTAHCDKQCQDWEKASHGACHKRENHWKCFCYFNC

SEQ ID NO: 642 - protein, 81 aa, Dacus carota
MAKNSTSPVSLFAISLIFFLLANSGSITEVDGKVCEKPSLTWSGKCGNTQHCDKQCQDWEGAKHGACHSRGGWKCFCYFEC

SEQ ID NO: 643 - protein, 49 aa, Clitoria ternatea
NLCERASLTWTGNCGNTGHCDTQCRNWESAKHGACHKRGNWKCFCYFNC

SEQ ID NO: 644 - protein, 80 aa, Dacus carota
MAKKSSSFCLSAIFLVLLLVANTGMVREVDGALCEKPSLTWSGNCRNTQHCDKQCQSWEGAKHGACHKRGNWKCFCYHAC

SEQ ID NO: 645 - protein, 92 aa, Bupleurum kaoi
MAKKLNAVTVSAIFLVVFLIASYSVGAAKEAGAEGEVVFPEQLCERASQTWSGDCKNTKNCDNQCIQWEKARHGACHKRGGKWMCFCYFDKC

SEQ ID NO: 646 - protein, 50 aa, Dahlia merckii
ELCEKASKTWSGNCGNTGHCDNQCKSWEGAAHGACHVRNGKHMCFCYFNC

SEQ ID NO: 647 - protein, 108 aa, Helianthus annuus
MAKISVAFNAFLLLLFVLAISEIGSVKGELCEKASQTWSGTCGKTKHCDDQCKSWEGAAHGACHVRDGKHMCFCYFNCSKAQKLAQDKLRAEELAKEKIEPEKATAKP

SEQ ID NO: 648 - protein, 117 aa, Cynara cardunculus
MAKNSVAFFALLLLICILTISEFAVVKGELCEKASKTWSGNCGNTRHCDDQCKAWEGAAHGACHTRNKKHMCFCYFNCPKAEKLAQDKLKAEELARDKVEAKEVPHFKHPIEPIHHP

SEQ ID NO: 649 - protein, 117 aa, Cynara cardunculus
MAKQWVSFFALAFIVFVLAISETQTVKGELCEKASKTWSGNCGNTKHCDDQCKSWEGAAHGACHVRNGKHMCFCYFNSCAEADKLSEDQIEAGKLAFEKAEKLDRDVKKAVPNVDHP

SEQ ID NO: 650 - protein, 94 aa, Dacus carota
MAQKVNSALIFSAIFVLFLVASYSVTVAEGARAGAEGEVVYPEALCERASQTWTGKCQHTDHCDNQCIQWENARHGACHKRGGNWKCFCYFDHC

SEQ ID NO: 651 - protein, 78 aa, Arabidopsis lyrata
MASSYTLMLFLCLSIFLIASTEMMAVEARICERRSKTWTGFCGNTRGCDSQCKSWERASHGACHAQFPGFACFCYFNC

SEQ ID NO: 652 - protein, 80 aa, Parthenium hysterophorus
MAKSSTSYLVFLLLVLVVAISEIASVNGKVCEKPSKTWFGNCKDTEKCDKRCMEWEGAKHGACHQRESKYMCFCYFDCDP

SEQ ID NO: 653 - protein, 78 aa, Arabidopsis thaliana
MASSYTLMLFLCLSIFLIASTEMMAVEGRICERRSKTWTGFCGNTRGCDSQCKRWERASHGACHAQFPGFACFCYFNC

SEQ ID NO: 654 - protein, 78 aa, Eutrema salsugineum
MASSYTLLLFVCLSIFFIASTEMMMVEGRVCERRSKTWTGFCGNTRGCDSQCKRWERASHGACHAQFPGFACFCYFNC

SEQ ID NO: 655 - protein, 82 aa, Vitis vinifera
MAKLLGYLLSYALSFLTLFALLVSTEMVMLEAKVCQRPSKTWSGFCGSSKNCDRQCKNWEGAKHGACHAKFPGVACFCYFNC

SEQ ID NO: 656 - protein, 82 aa, Corchorus olitorius
MAKSLSSFATFLALLCLFFLLSTPNEMKMAEAKICEKRSQTWSGWCGNSSHCDRQCKNWENARHGSCHADGLGWACFCYFNC

SEQ ID NO: 657 - protein, 58 aa, Corchorus olitorius
MEMKMAEGKICEKRSQTWSGWCGNSSHCDRQCKNWENARHGSCHADGLGWACFCYFNC

SEQ ID NO: 658 - protein, 78 aa, Camelina sativa
MASSLKLMLFLCLSIFLIASTEMMTVEGRTCERRSKTWTGFCGNTRGCDSQCRSWEGASHGACHAQFPGFACFCYFNC

SEQ ID NO: 659 - protein, 84 aa, Cucumis sativus
MAKVVGNSAKMIVALLFLLALMLSMNEKQGVVEAKVCERRSKTWSGWCGNTKHCDRQCKNWEGATHGACHAQFPGRACFCYFNC

SEQ ID NO: 660 - protein, 80 aa, Cynara cardunculus
MIDAFNYKQFSTVKGKICEKPSKTWFGKCQDTTKCDKQCIEWEDAKHGACHERESKLMCFCYYNCGPPKNTPPGTPPSPP

SEQ ID NO: 661 - protein, 78 aa, Capsella rubella
MASSYKLILFLCLSIFLIASFEMMAVEGRICQRRSKTWTGFCGNTRGCDSQCKRWERASHGACHAQFPGFACFCYFNC

SEQ ID NO: 662 - protein, 56 aa, Arabidopsis thaliana
MMAVEGRICERRSKTWTGFCGNTRGCDSQCKRWERASHGACHAQFPGFACFCYFNC

SEQ ID NO: 663 - protein, 78 aa, Brassica napus
MASSYTRLLLLCLSIFLIASTEVMMVEGRVCQRRSKTWTGFCGNTRGCDSQCKRWERASHGACHAQFPGFACFCYFNC

SEQ ID NO: 664 - protein, 78 aa, Brassica rapa
MASSYARLLLLCLSIFLIASTEVMMVEGRVCQRRSKTWTGFCGNTRGCDSQCKRWERASHGACHAQFPGFACFCYFNC

SEQ ID NO: 665 - protein, 78 aa, Camelina sativa
MASSLKLMLFLCLSIFLIASTEMMTVEGRTCERRSKTWTGFCGNTRGCDSQCRRWEHASHGACHAQFPGFACFCYFNC

SEQ ID NO: 666 - protein, 77 aa, Brassica napus
MASYTRLLLLCLSIFLIASTEVMMVEGRVCQRRSKTWTGFCGNTRGCDSQCKRWERASHGACHAQFPGFACFCYFNC

SEQ ID NO: 667 - protein, 56 aa, Vitis vinifera
MVMLEAKVCQRPSKTWSGFCGSSKNCDRQCKNWEGAKHGACHAKFPGVACFCYFNC

SEQ ID NO: 668 - protein, 88 aa, Brassica napus
MTKSFILVALLCICFILLSPTEMRLTLNACLKLAEAKICEKYSQTWSGRCTKTSHCDRQCINWEDARHGACHQDKHGRACFCYFNCKK

SEQ ID NO: 669 - protein, 78 aa, Raphanus sativus
MASSYTVFLLLCLSIFLIASTEVMMVEGRVCQRRSKTWTGFCGNTRGCDSQCKRWEHASHGACHAQFPGFACFCYFNC

SEQ ID NO: 670 - protein, 78 aa, Arabis alpine
MASSYTLLLFLCLSIFLIVSTEMMMVEGRICERRSKTWTGFCANTRGCDSQCKRWERASHGACHAQFPGVACFCYFNC

SEQ ID NO: 671 - protein, 84 aa, Cucumis melo
MAKVVGNSAKMIVAFLFLLALTLSMNEKQGVVEAKVCERRSKTWSGWCGDTKHCDRQCKNWEGAKHGACHAQFPGRACFCYFNC

SEQ ID NO: 672 - protein, 82 aa, Erythranthe guttate
MAASLVYRLSSVILIVLLLFIMLNNEVMVVESRLCERRSKTWTGFCGSSNNCNNQCRNWERASHGACHAQFPGFACFCYFNC

SEQ ID NO: 673 - protein, 76 aa, Sesamum indicum
MAKFQVSSTIFFALFFCFLLLASNEAKICQRMSKTWSGVCLNSGNCDRQCRNWERAQHGACHRRGLGFACLCYFKC

SEQ ID NO: 674 - protein, 110 aa, Eclipta prostrata
MAKNSVAFFAFLLILFVLAISEIGSVKGELCEKASQTWSGTCRITSHCDNQCKSWEGAAHGACHVRGGKHMCFCYFSHCAKAEKLTQDKLKAGHLVNEKSEADQKVPVTP

SEQ ID NO: 675 - protein, 105 aa, Cynara cardunculus
MAKNTKVSAFLFVFLFVFFLVVHSVTAFAIRFKCFDTDMLLKVIADMVVGMKGIEKVCRRRSKTWSGYCGDSKHCDQQCREWEGAEHGACHHEGLGRACFCYFNC

SEQ ID NO: 676 - protein, 110 aa, Ambrosia artemisiifolia
MAAGLLVFVLAISEIASVKGKLCEKPSVTWSGKCKVKQTDKCDKRCIEWEGAKHGACHKRDSKASCFCYFDCDPTKNPGPPPGAPKGKAPAPSPPSGGGGEGGGEGGGER

SEQ ID NO: 677 - protein, 111 aa, Ambrosia artemisiifolia
MAAGLLVFVLAISEIASVKGKLCEKPSLTWSGKCKVKQTDKCDKRCIEWEGAKHGACHKRDSKATCFCYFDCDPTKNPGPPPGAPKGKAPAPSPPSGGGAPPPSGGEGGER

SEQ ID NO: 678 - protein, 79 aa, Jatropha curcas
MAKLHSSALCFLIIFLFLLVSKEMAVTEAKLCQRRSKTWSGFCGDPGKCNRQCRNWEGASHGACHAQFPGFACFCYFKC

SEQ ID NO: 679 - protein, 79 aa, Nelumbo nucifera
MAKAPKSVSYFAFFFILFLLASSEIQKTKKLCERRSKTWSGRCTKTQNCDKQCKDWEYAKHGACHGSWFNKKCYCYFDC

SEQ ID NO: 680 - protein, 82 aa, Pyrus x bretschneideri
MAKLLSRLSIPLIVFVFLLILLASTEVAMVEARICQRRSKTWSGFCANTGNCNRQCTNWEGALHGACHAQFPGVACFCYFRC

SEQ ID NO: 681 - protein, 83 aa, Ricinus communis
MAKLHFPTLLCLFIFLFLLVSTEMQVTQAKVCQRRSKTWSGFCGSTKNCDRQCKNWEGALHGACHAQFPGVACFCYFKCGGER

SEQ ID NO: 682 - protein, 91 aa, Ambrosia artemisiifolia
KLCEKPSVTWSGKCKVKQTDKCDKRCIEWEGAKHGACHKRDSKASCFCYFDCDPTKNPGPPPGAPKGKAPAPSPPSGGGAPPPSGGEGGGD

SEQ ID NO: 683 - protein, 96 aa, Ambrosia artemisiifolia
KLCEKPSVTWSGNKVKQTDKCDKRCIEWEGAKHGACHKRDSKASCFCYFDCDPTKNPGPPPGAPKGKAPAPSPPSGGGAPPPSGGEGGGDGGGGRR

SEQ ID NO: 684 - protein, 82 aa, Prunus mume
MAKLLSHLLFYPILFLFLFIFLASTEVAILEARICQRRSKTWSGFCGNTRNCNRQCRNWEGALRGACHAQFPGFACFCYFRC

SEQ ID NO: 685 - protein, 80 aa, Corchorus olitorius
MAKTLQLFALFFIVILLANQEIPVAEAKLCQKRSKTWTGICIKTKNCDNQCKKWEKAEHGACHRQGIGFACFCYFNQKKC

SEQ ID NO: 686 - protein, 81 aa, Corchorus olitorius
MAKFVSTVALLFALFILLASFDEGMMPMAEAKVCSKRSKTWSGFCNSSANCNKQCREWEDAKHGACHFEFPGFACFCYFNC

SEQ ID NO: 687 - protein, 76 aa, Solanum pennellii
MNSKVILALLVCFLLIASNEMQGGEAKVCGRRSSTWSGLCLNTGNCNTQCIKWEHASSGACHRDGFGFACFCYFNC

SEQ ID NO: 688 - protein, 82 aa, Fragaria vesca
MAKLLGYHLVYPILFLFIFLLLASTEMGMLEARICQRRSKTWTGLCANTGNCHRQCRNWEGAQRGACHAQFPGFACFCYFNC

SEQ ID NO: 689 - protein, 80 aa, Corchorus capsularis
MAKFVSVALLLALFILVASFDEGMVPMAEAKLCSKRSKTWSGFCNSSANCNRQCREWEDAKHGACHFEFPGFACFCYFDC

SEQ ID NO: 690 - protein, 56 aa, Solanum tuberosum
MQGGEARVCERRSSTWSGPCFDTGNCNRQCINWEHASSGACHREGIGSACFCYFNC

SEQ ID NO: 691 - protein, 80 aa, Dimocarpus longan
MAKTLKSVQFFALFFLVILLAGSEMTAVEALCSKRSKTWSGPCFITSRCDRQCKRWENAKHGACHRSGWGFACFCYFNKC

SEQ ID NO: 692 - protein, 80 aa, Camelina sativa
MAKAATIVTLLFAALVFFAALETPTMVEAQKLCERPSGTWSGVCGNSNACKNQCINLEKARHGSCNYVFPAHKCICYFPC

SEQ ID NO: 693 - protein, 80 aa, Arabis alpine
MAKFASIIAFLFAALVLFASFEAPTMVEAQKYCEKPSGTWSGVCGNSNACNNQCINLEGARHGSCNYVFPYYRCICYFQC

SEQ ID NO: 694 - protein, 80 aa, Theobroma cacao
MAMSLKSVHFFALFFIVVLLANQEMPVAEAKLCQKRSKTWTGPCIKTKNCDHQCRKWEKAQHGACHWQWPGFACFCYVNC

SEQ ID NO: 695 - protein, 80 aa, Amborella trichopoda
MAKLVSPKAFFVFLFVFLLISASEFSGSEAKLCQKRSRTWSGFCANSNNCSRQCKNLEGARFGACHRQRIGLACFCYFNC

SEQ ID NO: 696 - protein, 80 aa, Arabidopsis thaliana
MAKSATIVTLFFAALVFFAALEAPMVVEAQKLCERPSGTWSGVCGNSNACKNQCINLEKARHGSCNYVFPAHKCICYFPC

SEQ ID NO: 697 - protein, 80 aa, Arabis alpine
MAKFASIITLLFAALVLFASLEAPTMVEAQKLCQRPSGTWSGVCGNNGACKNQCINLEKARHGSCNYVFPYHRCICYFPC

SEQ ID NO: 698 - protein, 80 aa, Brassica juncea
MAKVASIIALLFAALVLFAAFEAPTMVEAQKLCERPSGTWSGVCGNNNACKNQCINLEKARHGSCNYVFPAHKCICYFPC

SEQ ID NO: 699 - protein, 80 aa, Brassica oleracea
MAKFASIIALLFAALVLFAALEAPTMVEAQKLCERPSGTWSGVCGNNNACKNQCINLEKARHGSCNYVFPAHKCICYFPC

SEQ ID NO: 700 - protein, 80 aa, Camelina sativa
MAKPATIVTLLFAALVFFAALETPTMVEAQKLCERPSGTWSGVCGNNNACKNQCINLEKARHGSCNYVFPAHKCICYFPC

SEQ ID NO: 701 - protein, 80 aa, Camelina sativa
MAKSATIVTLLFAALVFFAALETPTMVEAQKLCERPSGTWSGVCGNNNACKNQCINLEKARHGSCNYVFPAHKCICYFPC

SEQ ID NO: 702 - protein, 80 aa, Brassica napus
MAKFASIIAPLFAVLVLFAAFEAPTMVEAQKLCERPSGTWSGVCGNNNACKNQCINLEKARHGSCNYVFPAHKCICYFPC

SEQ ID NO: 703 - protein, 80 aa, Eutrema salsugineum
MAKFASIITLLFAALVLFAVFEGPTMVEAQKLCERPSGTWSGVCGNNNACKNQCINLEKARHGSCNYVFPAHKCICYFPC

SEQ ID NO: 704 - protein, 80 aa, Raphanus sativus
MAKFASIIALLFAALVLFAAFEAPTMVEAQKLCERPSGTWSGVCGNNNACKNQCINLEKARHGSCNYVFPAHKCICYFPC

SEQ ID NO: 705 - protein, 80 aa, Raphanus sativus
MAKFASIVSLLFAALVLFTAFEAPAMVEAQKLCERPSGTWSGVCGNNNACKNQCINLEKARHGSCNYVFPAHKCICYFPC

SEQ ID NO: 706 - protein, 76 aa, Raphanus sativus
MNTKVILALLFCFLLVASNEMQVGEAKVCQRRSKTWSGPCINTGNCSRQCKQQEDARFGACHRSGFGFACFCYFKC

SEQ ID NO: 707 - protein, 80 aa, Brassica rapa
MAKFASIIAPLFAALVLFAAFEAPTMVEAQKLCERPSGTWSGVCGNNNACKNQCINLEKARHGSCNYVFPAHKCICYFPC

SEQ ID NO: 708 - protein, 76 aa, Solanum pennellii
MNTKLILALMFCFLLIASNEMQVGEAKVCQRRSKTWSGPCINTGNCSRQCKQQEDARFGACHRSGFGFACFCYFKC

SEQ ID NO: 709 - protein, 78 aa, Citrus clementina
MAKFTTTFALLFAFFILFAAFDVPMAEAKVCQRRSKTWSGLCLNTGNCSRQCKQQEDARFGACHRQGIGFACFCYFKC

SEQ ID NO: 710 - protein, 80 aa, Brassica rapa
MAKFTSIIVLLFAALVLFAGFEAPTMVEAQKLCERPSGTWSGVCGNNNACKNQCIRLEKARHGSCNYVFPARKCICYFPC

SEQ ID NO: 711 - protein, 78 aa, Eutrema salsugineum
MAKFASIITLLFAALVLFATFAPTMVEAKLCERPSGTWSGVCGNNNACKSQCQRLEGARHGSCNYVFPAHKCICYFPC

SEQ ID NO: 712 - protein, 79 aa, Eutrema salsugineum
MAKFASIITLLFAALVLFATFEAPTMVEAKLCERPSGTWSGVCGNNNACKSQCQRLEGARHGSCNYVFPAHKCICYFPC

SEQ ID NO: 713 - protein, 80 aa, Heliophila coronopifolia
MAKFASIIAFFFAALVLFAAFEAPTIVEAQKLCERPSGTWSGVCGNNNACRNQCINLEKARHGSCNYVFPAHKCICYFPC

SEQ ID NO: 714 - protein, 80 aa, Brassica oleracea
MAKVASIVALLFPALVIFAAFEAPTMVEAQKLCERPSGTWSGVCGNNNACKNQCIRLEKARHGSCNYVFPAHKCICYFPC

SEQ ID NO: 715 - protein, 76 aa, Cicer arietinum
MSKFYTVFMFLCLALLLISSWEVEAKLCQRRSKTWSGPCIITGNCKNQCKNVEHATFGACHRQGFGFACFCYFNCH

SEQ ID NO: 716 - protein, 82 aa, Citrus clementina
MAKSVASITTAFALIFAFFILFASFGVPMAEAKVCQRRSKTWSGPCLNTGKCSRQCKQQEYARYGACYRQGAGYACYCYFNC

SEQ ID NO: 717 - protein, 82 aa, Citrus sinensis
MAKSVASITTAFALIFAFFILFASFEVPMAEAKVCQRRSKTWSGPCLNTGKCSRHCKQQEDARYGACYRQGTGYACFCYFEC

SEQ ID NO: 718 - protein, 78 aa, Citrus sinensis
MAKFTTTFALLFAFFILFAAFDVPMAEAKVCQLRSKTWSGLCLNTGNCSRQCKQQEDARFGACHRQGIGFACFCYFKC

SEQ ID NO: 719 - protein, 76 aa, Citrus sinensis; identical to SEQ ID NO: 640

SEQ ID NO: 720 - protein, 106 aa, Artificial Sequence
  Synthetic construct
MSTATFVDIIIAILLPPLGVFLRFGCGVEFWICLVLTLLGYIPGIIYAIYVLTKRTCESQSHRFKGPCSRDSNCATVCLTEGFSGGDCRGFRRRCRCTRPCVFDEK

SEQ ID NO: 721 - protein, 442 aa, Bacillus subtilis
MFGYSMVQMVRANAHKLDWPLRETVLQLYKPFKWTPCFLHKFFETKLQNRKKMSVIIEFEEGCHETGFQMAGEVLQKEKRSKLKSRFNKINCCSAEVTPSALHSLLSECSNIRKVYLNREVKALLDTATEASHAKEVVRNGQTLTGKGVTVAVVDTGIYPHPDLEGRIIGFADMVNQKTEPYDDNGHGTHCAGDVASSGASSSGQYRGPAPEANLIGVKVLNKQGSGTLADIIEGVEWCIQYNEDNPDEPIDIMSMSLGGDALRYDHEQEDPLVRAVEEAWSAGIVVCVAAGNSGPDSQTIASPGVSEKVITVGALDDNNTASSDDDTVASFSSRGPTVYGKEKPDILAPGVNIISLRSPNSYIDKLQKSSRVGSQYFTMSGTSMATPICAGIAALILQQNPDLTPDEVKELLKNGTDKWKDEDPNIYGAGAVNAENSVPGQ

SEQ ID NO: 722 - protein, 775 aa, Bacillus subtilis
SSKTSADLEKAEVFGDIDMTTSKKTTVIVELKEKSLAEAKEAGESQSKSKLKTARTKAKNKAIKAVKNGKVNREYEQVFSGFSMKLPANEIPKLLAVKDVKAVYPNVTYKTDNMKDKDVTISEDAVSPQMDDSAPYIGANDAWDLGYTGKGIKVAIIDTGVEYNHPDLKKNFGQYKGYDFVDNDYDPKETPTGDPRGEATDHGTHVAGTVAANGTIKGVAPDATLLAYRVLGPGGSGTTENVIAGVERAVQDGADVMNLSLGNSLNNPDWATSTALDWAMSEGVVAVTSNGNSGPNGWTVGSPGTSREAISVGATQLPLNEYAVTFGSYSSAKVMGYNKEDDVKALNNKEVELVEAGIGEAKDFEGKDLTGKVAVVKRGSIAFVDKADNAKKAGAIGMVVYNNLSGEIEANVPGMSVPTIKLSLEDGEKLVSALKAGETKTTFKLTVSKALGEQVADFSSRGPVMDTWMIKPDISAPGVNIVSTIPTHDPDHPYGYGSKQGTSMASPHIAGAVAVIKQAKPKWSVEQIKAAIMNTAVTLKDSDGEVYPHNAQGAGSARIMNAIKADSLVSPGSYSYGTFLKENGNETKNETFTIENQSSIRKSYTLEYSFNGSGISTSGTSRVVIPAHQTGKATAKVKVNTKKTKAGTYEGTVIVREGGKTVAKVPTLLIVKEPDYPRVTSVSVSEGSVQGTYQIETYLPAGAEELAFLVYDSNLDFAGQAGIYKNQDKGYQYFDWDGTINGGTKLPAGEYYLLAYAANKGKSSQVLTEEPFTVE

SEQ ID NO: 723 - protein, 331 aa, Bacillus thuringiensis
MNLAKFPRKKYTESYTPIEKLNNFSEALGGPTIYFKRDDLLGLTAGGNKTRKLEFLVADAEAKGADTLITAGGIQSNHCRLTLAAAVKEKMKCILVLEEGLEPEEKPDFNGNYFLYHLLGAENVIVVPNGADLMEEMHKVAKEVSEKGNTPYVIPVGGSNPTGAMGYVACAQEIMAQSFDQGIDFSTVVCVSGSAGMHAGLITGFAGTQSHIPVIGINVSRGKAEQEEKVAKLVDETSAHVGIPNFIPRDAVTCFDEYVGPGYALPTPEMVEAVQLLAKTEGILLDPVYTGKAVAGLIDLIKKGTFNKEDNILFVHSGGSPALYANTSLFA

SEQ ID NO: 724 - protein, 331 aa, Bacillus pseudomycoides
MNLAKFPRKKYTESYTPIEKLNHFSEVLGGPSIYFKRDDLLGLTAGGNKTRKLEFLVADAQAKGVDTLITAGGIQSNHCRLTLAAAVKEKMKCILVLEEGLEPEEKPDFNGNYFLYHLLGAENVIVVPNGTDLMDEMQKVAKEVTEKGHTPYVIPVGGSNPTGAMGYIACAEEIMAQSFEQGIDFNAVVCVSGSGGMHAGLITGFYGRQTGIPIIGMNVSRGKAEQEEKVCKLVQETSAHVGIPNSIPREAVTCFDEYVGPGYALPTPEMVEAVQLLAKTEGILLDPVYTGKAVAGLIDIIRKGTFKKEDNILFVHSGGSPALYANTSLFS

SEQ ID NO: 725 - protein, 331 aa, Bacillus thuringiensis
MNLAKFPRKKYTESYTPIEKLNNFSEVLGGPTIYFKRDDLLGLTAGGNKTRKLEFLVADAQAKGADTLITAGGIQSNHCRLTLAAAVKEKMKCILVLEEGLEPEEKPDFNGNYFLYHLLGAENVIVVPNGADLMEEMHKVAKEVSEKGNTPYVIPVGGSNPTGAMGYVACAQEIMAQSFEQGIDFSSVVCVSGSGGMHAGLITGFAGTQSHIPVIGINVSRGKAEQEEKVAKLVDETSAHVGIPNFISRDAVTCFDQYVGPGYALPTQEMVEAVQLLAKTEGILLDPVYTGKAVAGLIDLIKKGTFNKEDNILFVHSGGSPALYANTSLFA

SEQ ID NO: 726 - protein, 331 aa, Bacillus thuringiensis
MNLAKFPRKKYTESYTPIEKLNNFSEALGGPTIYFKRDDLLGLTAGGNKTRKLEFLVADAQEKGADTLITAGGIQSNHCRLTLAAAVKEKMKCILVLEEGLEPEEKRDFNGNYFLYHLLGAENVIVVPNGADLMEEMNKVAKEVSEKGSTPYVIPVGGSNPTGAMGYVACAQEIMAQSFEQGIDFSSVVCVSGSGGMHAGLITGFSGTQSHIPVIGINVSRGKAEQEEKVAKLVDETSAHVGIPNFISRDAVTCFDEYVGPGYALPTPEMVEAVQLLAKTEGILLDPVYTGKAVAGLIDLIRKGKFNKEDNILFVHSGGSPALYANTSLFA

SEQ ID NO: 727 - protein, 331 aa, Bacillus thuringiensis
MNLAKFPRKKYTESYTPIEKLNNFSEALGGPTIYFKRDDLLGLTAGGNKTRKLEFLVADAEAKGADTLITAGGIQSNHCRLTLAAAVKEKMKCILVLEEGLEPEEKPDFNGNYFLYHLLGAENVIVVPNGADLMEEMHKVAKEVSEKGNTPYVIPVGGSNPTGAMGYVACAQEIMAQSFDQGIDFSTVVCVSGSAGMHAGLITGFAGTQSHIPVIGINVSRGKAEQEEKVAKLVDETSAHVGIPNFIPRDAVTCFDEYVGPGYALPTPEMVEAVQLLAKTEGILLDPVYEGKAVAGLIDLIKKGTFNKEDNILFVHLGGSPALYANTSLFA

SEQ ID NO: 728 - protein, 331 aa, Bacillus pseudomycoides
MNLAKFPRKKYTESYTPIEKLNHFSEVLGGPSIYFKRDDLLGLTAGGNKTRKLEFLVADAQAKGVDTLITAGGIQSNHCRLTLAAAVKEKMKCILVLEEGLEPEEKPDFNGNYFLYHLLGAENVIVVPNGTDLMDEMQKVAKEVTEKGHTPYVIPVGGSNPTGAMGYIACAEEIMAQSFEQGIDFNAVVCVSGSGGMHAGLITGFYGRQTGIPIIGMNVSRGKAEQEEKVCKLVQETSAHVGIPNSIPREAVTCFDEYVGPGYALPTPEMVEAVQLLAKTEGILLDPVYEGKAVAGLIDIIRKGTFKKEDNILFVHLGGSPALYANTSLFS

SEQ ID NO: 729 - protein, 331 aa, Bacillus thuringiensis
MNLAKFPRKKYTESYTPIEKLNNFSEVLGGPTIYFKRDDLLGLTAGGNKTRKLEFLVADAQAKGADTLITAGGIQSNHCRLTLAAAVKEKMKCILVLEEGLEPEEKPDFNGNYFLYHLLGAENVIVVPNGADLMEEMHKVAKEVSEKGNTPYVIPVGGSNPTGAMGYVACAQEIMAQSFEQGIDFSSVVCVSGSGGMHAGLITGFAGTQSHIPVIGINVSRGKAEQEEKVAKLVDETSAHVGIPNFISRDAVTCFDQYVGPGYALPTQEMVEAVQLLAKTEGILLDPVYEGKAVAGLIDLIKKGTFNKEDNILFVHLGGSPALYANTSLFA

SEQ ID NO: 730 - protein, 331 aa, Bacillus thuringiensis
MNLAKFPRKKYTESYTPIEKLNNFSEALGGPTIYFKRDDLLGLTAGGNKTRKLEFLVADAQEKGADTLITAGGIQSNHCRLTLAAAVKEKMKCILVLEEGLEPEEKRDFNGNYFLYHLLGAENVIVVPNGADLMEEMNKVAKEVSEKGSTPYVIPVGGSNPTGAMGYVACAQEIMAQSFEQGIDFSSVVCVSGSGGMHAGLITGFSGTQSHIPVIGINVSRGKAEQEEKVAKLVDETSAHVGIPNFISRDAVTCFDEYVGPGYALPTPEMVEAVQLLAKTEGILLDPVYEGKAVAGLIDLIRKGKFNKEDNILFVHLGGSPALYANTSLFA

SEQ ID NO: 731 - protein, 305 aa, Hordeum vulgare
GVCYGVIGNNLPSRSDVVQLYRSKGINGMRIYFADGQALSALRNSGIGLILDIGNDQLANIAASTSNAASWVQNNVRPYYPAVNIKYIAAGNEVQGGATQSILPAMRNLNAALSAAGLGAIKVSTSIRFDEVANSFPPSAGVFKNAYMTDVARLLASTGAPLLANVYPYFAYRDNPGSISLNYATFQPGTTVRDQNNGLTYTSLFDAMVDAVYAALEKAGAPAVKVVVSESGWPSAGGFAASAGNARTYNQGLINHVGGGTPKKREALETYIFAMFNENQKTGDATERSFGLFNPDKSPAYNIQF

SEQ ID NO: 732 - protein, 839 aa, Paenibacillus spp.
AETAGTTITSMSYFSTADGPIITKSGVGQASYGFVMPIFNGGSATWNDVAQDLGVKVKVNGSWVDIDSVSSFVYNQNWGHWNDGGFTGYWFTLSATTEIQLYSKANEVTLEYSLVFQNINKTTITAMTPTQGPQITAGFTGGAGFTYPIFNHDPAITYAAVADDLKVYVKPVNSSQWIDIDNNAASGWIYDQNFGQFTDGGGGYWFNVTESINVKLESKTSSTNIVYTISFNEPVRNSYVLTPYEGTTFTADASGAIGIPLPKIDGGAPIGTELGNFVYQININGQWVDLDNSSQSGFVYSANGYNNMSAANQWGYWADHIYGLWFQPIQVDMQIRIGYPLNGQAGGSVGSNFVNYTLIGNPDAPRPDVNDQEDIPIGTPNDSAIEGMNLIWQDEFNGTALDQSKWNYETGYYLNDDPNTWGWGNSELQHYTDRAQNVFVQDGKLNIKALNEPKSFPQDPSRYAQYSSGKINTKDHFSLKYGRVDFRAKLPTGNGIWPALWMLPQDNVYGTWASSGEIDVMEAKGRLPGSTSGAVHFGGQWPTNRYLSGEYHFPEGQTFANDYHVYSVVWEEDNIKWYVDGKFFFKVTRDQWYSAAAPNNPNAPFDQPFYLIMNLAIGGTFDGGRTPDPSDIPATMQVDYVRVYKEGEGGGQNPGNVPVTGVTVNPTTAQVEVGQSVQLNASVAPSNATNKQVTWSVSGSSIASVSPNGLVTGLAQGTTTVTATTADGNKAASATITVAPAPSTVIVIGDEVKGLKKIGDDLLFYVNGATFADLHYKVNNGGQLNVAMAPTGNGNYTYPVHNLKHGDTVEYFFTYNPGQGALDTPWQTYVHGVTQGTPE

SEQ ID NO: 733 - protein, 644 aa, Bacillus circulans
AGTTVTSMEYFSPADGPVISKSGVGKASYGFVMPKFNGGSATWNDVYSDVGVNVKVGNNWVDIDQAGGYIYNQNWGHWSDGGFNGYWFTLSATTEIQLYSKANGVKLEYQLVFQNINKTTITAMNPTQGPQITASFTGGAGFTYPTFNNDSAVTYEAVADDLKVYVKPVNSSSWIDIDNNAASGWIYDHNFGQFTDGGGGYWFNVTESINVKLESKTSSANLVYTITFNEPTRNSYVITPYEGTTFTADANGSIGIPLPKIDGGAPIAKELGNFVYQININGQWVDLSNSSQSKFAYSANGYNNMSDANQWGYWADYIYGLWFQPIQENMQIRIGYPLNGQAGGNIGNNFVNYTFIGNPNAPRPDVSDQEDISIGTPTDPAIAGMNLIWQDEFNGTTLDTSKWNYETGYYLNNDPATWGWGNAELQHYTNSTQNVYVQDGKLNIKAMNDSKSFPQDPNRYAQYSSGKINTKDKLSLKYGRVDFRAKLPTGDGVWPALWMLPKDSVYGTWAASGEIDVMEARGRLPGSVSGTIHFGGQWPVNQSSGGDYHFPEGQTFANDYHVYSVVWEEDNIKWYVDGKFFYKVTNQQWYSTAAPNNPNAPFDEPFYLIMNLAVGGNFDGGRTPNASDIPATMQVDYVRVYKEQ

SEQ ID NO: 734 - protein, 626 aa, Bacillus subtilis
ETANKSNELTAPSIKSGTILHAWNWSFNTLKHNMKDIHDAGYTAIQTSPINQVKEGNQGDKSMSNWYWLYQPTSYQIGNRYLGTEQEFKEMCAAAEEYGIKVIVDAVINHTTSDYAAISNEVKSIPNWTHGNTQIKNWSDRWDVTQNSLLGLYDWNTQNTQVQSYLKRFLDRALNDGADGFRFDAAKHIELPDDGSYGSQFWPNITNTSAEFQYGEILQDSASRDAAYANYMDVTASNYGHSIRSALKNRNLGVSNISHYASDVSADKLVTWVESHDTYANDDEESTWMSDDDIRLGWAVIASRSGSTPLFFSRPEGGGNGVRFPGKSQIGDRGSALFEDQAITAVNRFHNVMAGQPEELSNPNGNNQIFMNQRGSHGVVLANAGSSSVSINTATKLPDGRYDNKAGAGSFQVNDGKLTGTINARSVAVLYPDDIAKAPHVFLENYKTGVTHSFNDQLTITLRADANTTKAVYQINNGPETAFKDGDQFTIGKGDPFGKTYTIMLKGTNSDGVTRTEKYSFVKRDPASAKTIGYQNPNHWSQVNAYIYKHDGSRVIELTGSWPGKPMTKNADGIYTLTLPADTDTTNAKVIFNNGSAQVPGQNQPGFDYVLNGLYNDSGLSGSLPH

SEQ ID NO: 735 - protein, 512 aa, Bacillus licheniformis
MKQQKRLYARLLPLLFALIFLLPHSATAAANLNGTLMQYFEWYMPNDGQHWKRLQNDSAYLAEHGITAVWIPPAYKGTSQDDVGYGAYDLYDLGEFHQKGTVRTKYGTKGELQSAINSLHSRGINVYGDVVINHKGGADATEDVTAVEVDPADRNRVTSGEQRIKAWTHFQFPGRGSTYSDFKWHWYHFDGTDWDESRKLNRIYKFQGKAWDWEVSNENGNYDYLMYADIDYDHPDVTAEIKRWGTWYANELQLDGFRLDAVKHIKFSFLRDWVNHVREKTGKEMFTVAEYWQNDLGALENYLNKTNFNHSVFDVPLHYQFHAASTQGGGYDMRKLLNGTVVSKHPVKAVTFVDNHDTQPGQSLESTVQTWFKPLAYAFILTREAGYPQIFYGDMYGTKGASQREIPALKHKIEPILKARIQYAYGAQHDYFDHHDIVGWTREGDSSVANSGLAALITDGPGGTKRMYVGRQNAGETWHDITGNRSDSVVINAEGWGEFHVNGGSVSIYVQR

SEQ ID NO: 736 - protein, 31 aa, Bacillus amyloliquefaciens
MIQKRKRTVSFRLVLMCTLLFVSLPITKTSA

SEQ ID NO: 737 - protein, 218 aa, Schistosoma japonicum
MSPILGYWKIKGLVQPTRLLLEYLEEKYEEHLYERDEGDKWRNKKFELGLEFPNLPYYIDGDVKLTQSMAIIRYIADKHNMLGGCPKERAEISMLEGAVLDIRYGVSRIAYSKDFETLKVDFLSKLPEMLKMFEDRLCHKTYLNGDHVTHPDFMLYDALDVVLYMDPMCLDAFPKLVCFKKRIEAIPQIDKYLKSSKYIAWPLQGWQATFGGGDHPPK

SEQ ID NO: 738 - protein, 7 aa, Artificial Sequence
  Synthetic construct
GGGGGGS

SEQ ID NO: 739 - protein, 5 aa, Artificial Sequence
  Synthetic construct
DDDDK

SEQ ID NO: 740 - DNA, 21 bp, Artificial Sequence
  Synthetic construct
actcctacgggaggcagcagt

SEQ ID NO: 741 - DNA, 16 bp, Artificial Sequence
  Synthetic construct
  misc_feature (15)..(15): n= g or a
gggttgcgctcgttnc

SEQ ID NO: 742 - DNA, 20 bp, Artificial Sequence
  Synthetic construct
tcgagcgcgtatgcaatacg

SEQ ID NO: 743 - DNA, 24 bp, Artificial Sequence
  Synthetic construct
gcgttatcccgtagaaaaaggtag

SEQ ID NO: 744 - DNA, 17 bp, Artificial Sequence
  Synthetic construct
agacggtgagtaacgcg

SEQ ID NO: 745 - protein, 8 aa, Physcomitrella patens
GGIRAAPT

SEQ ID NO: 746 - protein, 10 aa, Macleaya cordata
GIRDAPAGNE

SEQ ID NO: 747 - protein, 12 aa, Brachypodium distachyon
GGARAAPAGEER

SEQ ID NO: 748 - protein, 11 aa, Vigna angularis
GGIRTAITGNE

SEQ ID NO: 749 - protein, 10 aa, Lactuca sativa
GGISASPTGN

SEQ ID NO: 750 - protein, 11 aa, Vigna radiata
GGIRRARTGNE

SEQ ID NO: 751 - protein, 12 aa, Artificial Sequence
  Synthetic construct
GGIRRAPTGNER

SEQ ID NO: 752 - protein, 12 aa, Artificial Sequence
  Synthetic construct
GGIRDAPTGNER

SEQ ID NO: 753 - protein, 12 aa, Artificial Sequence
  Synthethic construct
GGIRAARTGNER

SEQ ID NO: 754 - protein, 12 aa, Artificial Sequence
  Synthetic construct
GGIRAAPTGKER

SEQ ID NO: 755 - protein, 12 aa, Artificial Sequence
  Synthetic construct
GGIRASPTGNER

SEQ ID NO: 756 - protein, 8 aa, Physcomitrella patens
TPAARIGG

SEQ ID NO: 757 - protein, 10 aa, Macleaya cordata
ENGAPADRIG

SEQ ID NO: 758 - protein, 12 aa, Brachypodium distachyon
REEGAPAARAGG

SEQ ID NO: 759 - protein, 11 aa, Vigna angularis
ENGTIATRIGG

SEQ ID NO: 760 - protein, 10 aa, Lactuca sativa
NGTPSASIGG

SEQ ID NO: 761 - protein, 11 aa, Vigna radiata
ENGTRARRIGG

SEQ ID NO: 762 - protein, 12 aa, Artificial Sequence
  Synthetic construct
RENGTPARRIGG

SEQ ID NO: 763 - protein, 12 aa, Artificial Sequence
  Synthetic construct
RENGTPADRIGG

SEQ ID NO: 764 - protein, 12 aa, Artificial Sequence
  Synthetic construct
RENGTRAARIGG

SEQ ID NO: 765 - protein, 12 aa, Artificial Sequence
  Synthetic construct
REKGTPAARIGG

SEQ ID NO: 766 - protein, 12 aa, Artificial Sequence
  Synthetic construct
RENGTPSARIGG

SEQ ID NO: 767 - protein, 1761 aa, Paenibacillus sp.
AGWAAPAASSGAGAIQASSEEPGISADQAGAGAAFKDIQGTWASRQVGKWAGLGLVNGSGGQFRPGDTVSRAEFAKLVNALFGFTAKTGGTLGDVAPGKWYAEQVAIALQAGYMEGYPGGLFKPEAAVTRQEAAKIAALLFPLATADSAAVLSGFKDRTAIGGFAVQPLADLVSAGALKGFADGTLRPQQPLTRAEAVVLLDRLAGEIIRQPGSYDGVKSDSGLLIASADTILKQAEVKGNVLITAGVGEGEVTLDGLSADGTLYVNGGGSHSVHLRNAKVGKVVVNKSGGPVRVVLEGSSKVGEMSLETGAVVEVGEQAEVASLQVEQSAGGTELNVKGTVGELQTQASGVTLNGETFEQGKVLEVQQGKAADKTEPQNGNAPAGGTSGGGAASPGNGGGSGGGGNGGGGTAGENLAAPVLTPDPVNNVLGRDVALTFADNPAWRNAISEITLNGRKLTLTADYLLSAGSLTLKASVFAETGDHTLIIKAAGYTDVSVTQPMGKWELVWGDEFDGSGTHVDANGVNLDKWGYQNGTGAEYGLDGWGNNEQQYYTKDNLKVQDGKLTITAKKQPLGGKPYTSGRLWTSPTFTKQYGRFEASIKLPEGEGLWPAFWMMPKDSKYGVWASSGELDIMEVRGRLPEESSGTIHYGKPWPNNKSTGTDYHFPAGQSISSGFHTYAVEWEPGEIRWYVDGNLFQKVDEWSSEGAGQPDKYAFPAPFDQPFYIILNLAVGGNFDGNRLPPDSKLPAEMQVDYVRAYELDGKPYKTPVEPVLAKEPIPAEARQPVDGSYIADSNFEQGLTDIPVSSQPLSADKWNFLHTPDYGGAGSASIEQIENRNFAKIVPTSAGNQNYSLQMIQYAPLVRGHVYKLSFDAKSDAERSIAVKMGGDGDNGWAAYSDNFDVKLQASLQHYEYRFVMGAQTDLTARLEFNAGLNTHPVWIGHVRLEETDQVTDPDGAKTPLEDGNHIYNGTFDLGTMDRMKYWHFVTEAPDGGADASASVDPDARELAVDIRSGGSHPQAVRLLQKGINLLQNDTYELTFEAKAGSPRSIGVTLLSKDGSTIYGKAEGLAVGTTAEQQTVTFTMPVQVSDPEGQLVFELGGGQAGKAALTLDNIRLIRTTNNNVDYSKVSLYPLVNGDFSAGLSGWEPFTQGAAANFSAADGIAKVSVSNVGTEAWNIMFNQSNLNLTKGFTYVLAFDAKSSAARDTEVTLEDAAYNRRFDSGFISLGTDWQHYEYTVKAAADDNVALKLLLGKTPQAPNGAHDVSFRNVVLEVKDAPLQRPPALAADATDNRYGQPVQIGFKDNEAWRTAISSILVNDRVLEAGAYEIQPGALILLAPSFSSEGTYRITVKAAGYADTSVTQVLIAGDGNLLVNGGFDQEKTAWELWVANEGDTTFDVKDGAAELNIHYYGGLDPQWGVPFSWYTQLMQSGVKVEAGKTYELSFRAWSSVDRPILVELTGYNNNQQLPFSITGDSQEVYTAVLKPSANAVFTLKYLLGNVITDGLTTPDAEHQLHLDDIKLTEVKGGPQLTADTTENQAGHEIELTFPDDPDWRGAISGVLINGTAAGMDKVAAGPGSLKLEASLFPSPGSYTISILAQGYAGNTVSQLILSASPNVALGKTATASTSVQSASGAVDGNANTRWESDFNDPQWLSVDLGGLYRIDSVLLNWEGAYGKTYQVQISQAEQPGENDWTDWYTEAAGNGGQDLVFAAPAEARHVRILGTARATQYGYSLWEMEVYGTPAEDQTAAGEDVNP

SEQ ID NO: 768 - protein, 285 aa, Paenibacillus sp.
TQPMGKWELVWGDEFDGSGTHVDANGVNLDKWGYQNGTGAEYGLDGWGNNEQQYYTKDNLKVQDGKLTITAKKQPLGGKPYTSGRLWTSPTFTKQYGRFEASIKLPEGEGLWPAFWMMPKDSKYGVWASSGELDIMEVRGRLPEESSGTIHYGKPWPNNKSTGTDYHFPAGQSISSGFHTYAVEWEPGEIRWYVDGNLFQKVDEWSSEGAGQPDKYAFPAPFDQPFYIILNLAVGGNFDGNRLPPDSKLPAEMQVDYVRAYELDGKPYKTPVEPVLAKEPIPAEA

SEQ ID NO: 769 - protein, 309 aa, Arabidopsis thaliana
QIGVCYGMLGDTLPSPSDVVALYKQQNIQRMRLYGPDPGALAALRGSDIELILDVPSSDLERLASSQTEADKWVQENVQSYRDGVRFRYINVGNEVKPSVGGFLLQAMQNIENAVSGAGLEVKVSTAIATDTTTDTSPPSQGRFRDEYKSFLEPVIGFLASKQSPLLVNLYPYFSYMGDTANIHLDYALFTAQSTVDNDPGYSYQNLFDANLDSVYAALEKSGGGSLEIVVSETGWPTEGAVGTSVENAKTYVNNLIQHVKNGSPRRPGKAIETYIFAMFDENKKEPTYEKFWGLFHPDRQSKYEVNFN

SEQ ID NO: 770 - protein, 315 aa, Citrus sinensis
QIGVCYGMKAKILPSKRDVVALYNQNNIRRMRLYDPNIEALEALRGSNIEVMLGLPNENLQRIASNQAEANTWVQNNVRNFANNVKFKYIAVGNEAKPGDNFAQYLVPAMRNIQNAINGAGLGNQIKVSTAIETGALGESFPPSRGSFKQDYRPILDPLIRFLNENRSPLLLNLYPYFAIAGNRQISLDYALFRSQQTVVSDGSLSYRSLFDAILDAVYAALEKTGGGSLDIVISESGWPTAGGDGALTNVDNARTYNNNLIQHVKRGSPKRPGRPIETYIFAMFDENGKMGPEIERHWGLFAPNRQPKYQINFN

SEQ ID NO: 771 - protein, 430 aa, Streptomyces sioyaensis
SAPAPPSGWSQVFLDDFDGAAGSSVNTANWQFDTGTSYPGGAGNWGTGEVESMTSSTSNVSLDGNGDLLITPRRDASGNWTSGRIETTRTDFQPPAGGKLRVEARLQMPNVTGDAAAGYWPAFWMLGAPFRGNYQNWPGVGELDIMENVQGLNKTWATMHCGTSPGGPCNETSGIGNLTACPNTTCHSGLHTYTMEWDRSVSPEAIRFSVDGVTYQTVTANHMDAVTWTNATNHGFFVILNVAMGGGFPGAFGGGPTGATEPGHPMVVDYVQVLQSSGGGGGGGGGTTPPPTGDRDAYGQIQAESYDGQSGVATETTTDTGGGQDMGYLANGDWALYKGVNFGSTPATQFYGRVASGAGGGVSGLVEVRLDSRTNAPIGSFAVGDTGGWQSWRTVPANIGSVTGTHDVYLTFSSGQPADFVNVNWFDFGH

SEQ ID NO: 772 - protein, 383 aa, Cellulosimicrobium cellulans strain DK-1
APGDLLWSDEFDGAAGSAPNPAVWNHETGAHGWGNAELQNYTASRANSALDGQGNLVITARREGDGSYTSARMTTQGKYQPQYGRIEARIQIPRGQGIWPAFWMLGGSFPGTPWPSSGEIDIMENVGFEPHRVHGTVHGPGYSGGSGITGMYQHPQGWSFADTFHTFAVDWKPGEITWFVDGQQFHRVTRASVGANAWVFDQPFFLILNVAVGGQWPGYPDGTTQLPQQMKVDYVRVYDNGSGSSNPGNPGTGLPTGTGAVRAANGMCIDVPWADPTDGNPVQIVTCSGNAAQTWTRGSDGTVRALGKCLDVRDGSTTRGAAVQVWTCNGTGAQKWAYDAGSKALRNPQSGLCLDATGGAPLHDGQRLQTWTCNGTTAQQWTL

SEQ ID NO: 773 - protein, 390 aa, Kitasatospora phosalacinea
ATTPLAAAPVAAGNWGDDFDGPAGAAVDPAKWTLETGGSGNGNHELQYYTAGAANAALDGQGHLVITAKRNTDPGLSCWYGTCQYTSARLNTSRTFTQAYGHFESRIKIPRGQGIWPAFWMLGNDLGTAGWPNSGEIDVMENIGREPGTVHGTIHGPGYSGAGGIGAPYSLPAGQSFADAFHTFAVDWSPTAITWSVDGTAYQTRTPADLGGNRWVFDHPFFVILNLAVGGDWPGSPDGSSTYPQTMTVDYVHTTTWGGSTGGSYTGQITGPGGMCMDVAGASSADSTPIQLHNCTGNAAQQWTVGADGTVRALGKCLDVAAASHNDGAAIQLYTCNGTSAQQWTHRSGNDLLNPGSGKCLDSPNGSSADGTHLQLWTCNGTGAQKWTLG

SEQ ID NO: 774 - protein, 388 aa, Streptomyces sp. SYBC17
RTAAPEQARTAAGAAAAVSTFSDTFDGPAGAAVDSSKWTLETGDNVNNHERQYYTSGTKNAALDGQGHLVITARKENPAGYQCWYGSCQYTSARLNTAGKFNAQYGHVEARMKIPRGQGMWPAFWMLGTPVNWPDSGEIDVMENVGFEPSTVHGTIHGPGYSGSGGIGAAYSLPNGQAFADAFHTFAVDWAPDSITWSVDGNVYQRRTPADLGGKSWVFNKPFFLILNLAVGGYWPGDPDGSTQFPQTLVVDSVSVTTSGGGAGVPIRGLAGKCVDVAGANSANGTPVQLYDCNGTGAQAWTAGSDGTLRALGKCLDVSGGGTADGTPVQLWDCNGSPAQQWALPAARDIVNPQANKCLDVTGNNAANGTRLQIWTCTGGANQKWTVG

SEQ ID NO: 775 - protein, 405 aa, Streptomyces sp. S27
AGPAGETAGRTVQKAAQGAEAAPAAVLFEENFDGPAGSAVDSRRWQLETGDNSGNNHERQYYTPGNANAALDGNGNLVITARKENPGNYQCWYGRCEYTSARMNTAGKFTTTYGHIEARMKLPRGQGMWPAFWMLGHDIGSVGWTNSGEIDIMENVGYEPGTVHGTLHGPGYSGGEGIGAGYTLPGGRAFADDFHTFAVDWSPNSITWSVDGQVYQRRTPADLGGDRWVFDKPFFLILNLAVGGDWPGLPDSSTVFPQKLVVDYVRVTSGGDSGGGGGGRTGTITGLAGKCLDVAWADTANGTPVQIHDCNGNAAQQWTVGTDGTIRALGKCLDVSGAGKADGTPVQIWDCNGTAAQQWVVTGARDIVNPNADKCLDVRDNNSANGTKTQIWTCSGTANQKWNTP

SEQ ID NO: 776 - protein, 384 aa, Paenibacillus sp IAM1165
APNWNLVWSDEFNGTSLNRANWTPEIGTGSGGWGNNELQYYTDRAQNVQVTGGNLVITAQKESYGGMNYTSARIKTQDLKSFTYGKVEARIKLPSGQGLWPAFWMLGSNISSVGWPKSGEIDIMERVNNNPYVNGTVHWDAGGHADFGRVSGNLDFSQFHVYSIEWDSKYIRWFVDGQQFNEFYIENGTGNTEEFQRPFFILLNLAVGGNWPGSPNNSTPFPSQMLVDYVRVYQDTGASNVISDGIYTIASKASGKVMDVVDVSTARGAKIQQWTNYVANNQRFRVESTGDGYYKLTAVHSGKVLDVPSSSTSTGVQLQQWDDNGSNAQRWKIVDVGGGYYKLVSKVSGLAVDVASASTADGAVVQQWTDNGTDAQKWLFTKIN

SEQ ID NO: 777 - protein, 642 aa, Bacillus thuringiensis
DSPKQSQKIVGYFPSWGVYGRNYQVADIDASKLTHLNYAFADICWKGKHGNPSTHPDNPNKQTWNCKESGVPLQNKEVPNGTLVLGEPWADVTKSYPGSGTTWEDCDKYARCGNFGELKRLKAKYPHLKTIISVGGWTWSNRFSDMAADEKTRKVFAESTVAFLRAYGFDGVDLDWEYPGVETIPGGSYRPEDKQNFTLLLQDVRNALNKAGAEDGKQYLLTIASGASQRYADHTELKKISQILDWINIMTYDFHGGWEATSNHNAALYKDPNDPAANTNFYVDGAIDVYTNEGVPVDKLVLGVPFYGRGWKSCGKENNGQYQPCKPGSDGKLASKGTWDDYSTGDTGVYDYGDLTANYVNKNGFVRYWNDTAKVPYLYNATTGTFISYDDNESMKYKTDYIKTKGLSGAMFWELSGDCRTSPKYSCSGPKLLDTLVKELLGGPINQKDTEPPTNVKNIIVTNKTSSSVQLSWTASTDNVGVTEYEITAGEEKWSATTNSITIKNLKPNTEYTFSVIAKDASGNKSHPTALTVKTDEANTTPPDGNGTATFSVTSNWGSGYNFSIIIKNNGTIPIKNWKLEFDYSGNLTQVWDSKISSKTNNHYVITNAGWNGEIPPGGSITIGGAGTGNPAELLNAVISEN

SEQ ID NO: 778 - protein, 499 aa, Serratia marcescens
MSTRKAVIGYYFIPTNQINNYTETDTSVVPFPVSNITPAKAKQLTHINFSFLDINSNLECAWDPATNDAKARDVVNRLTALKAHNPSLRIMFSIGGWYYSNDLGVSHANYVNAVKTPASRAKFAQSCVRIMKDYGFDGVDIDWEYPQAAEVDGFIAALQEIRTLLNQQTVADGRQALPYQLTIAGAGGAFFLSRYYSKLAQIVAPLDYINLMTYDLAGPWEKVTNHQAALFGDAAGPTFYNALREANLGWSWEELTRAFPSPFSLTVDAAVQQHLMMEGVPSAKIVMGVPFYGRAFKGVSGGNGGQYSSHSTPGEDPYPSTDYWLVGCEECVRDKDPRIASYRQLEQMLQGNYGYQRLWNDKTKTPYLYHAQNGLFVTYDDAESFKYKAKYIKQQQLGGVMFWHLGQDNRNGDLLAALDRYFNAADYDDSQLDMGTGLRYTGVGPGNLPIMTAPAYVPGTTYAQGALVSYQGYVWQTKWGYITSAPGSDSAWLKVGRVA

SEQ ID NO: 779 - protein, 31 aa, Paenibacillus sp.
MTLSSGKSNRFRRRFAAVLFGTVLLAGQIPA

SEQ ID NO: 780 - protein, 30 aa, Arabidopsis thaliana
MSESRSLASPPMLMILLSLVIASFFNHTAG

SEQ ID NO: 781 - protein, 33 aa, Citrus sinensis
MAKFFSSPNTSSTAPVVLFVVGLLMATLHTASA

SEQ ID NO: 782 - protein, 48 aa, Streptomyces sioyaensis
MSDSSGTPRPRSHSRPRSRSVRRALMAAVATFGLAAAVATAATGPADA

SEQ ID NO: 783 - protein, 56 aa, Cellulosimicrobium cellulans strain DK-1
MDLARHRSLTPPTTPPGTSVGPRPRARRRLAGALVAALTAAAAALAVTVPATSAAA

SEQ ID NO: 784 - protein, 37 aa, Kitasatospora phosalacinea strain SYBCQL
MAAAPRTRRWSLGGFVLLVATALVAAAPFGSAPTGSA

SEQ ID NO: 785 - protein, 30 aa, Streptomyces sp. SYBC17
MASPRLLRRCLFAALSAALVGSVAVGPAQA

SEQ ID NO: 786 - protein, 48 aa, Streptomyces sp. S27
MVMHPTTPHTPHDPPRGKPARRRRSRRWASAATLLTLAVTMAVTGTAA

SEQ ID NO: 787 - protein, 27 aa, Paenibacillus sp IAM1165
MMLRKGICVVILFSLLVVLLPVNKTNA

SEQ ID NO: 788 - protein, 23 aa, Xanthomonas species
NQGISEKQLDQLLTQLIMALLQQ

SEQ ID NO: 789 - protein, 12 aa, Xanthomonas species
LDQLLTQLIMAL

SEQ ID NO: 790 - protein, 19 aa, Xanthomonas species
SEKQLDQLLTQLIMALLQQ

SEQ ID NO: 791 - protein, 142 aa, Xanthomonas citri
MMNSLNTQLGANSSFFQVDPSQNTQSGSNQGNQGISEKQLDQLLTQLIMALLQQSNNAEQGQGQGQGGDSGGQGGNRQQAGQSNGSPSQYTQMLMNIVGDILQAQNGGGFGGGFGGGFGGGLGTSLGTSLGTSLASDTGSMQ

SEQ ID NO: 792 - protein, 19 aa, Pantoea sesami
QLEQLMTQLRARLCRLMAM

SEQ ID NO: 793 - protein, 19 aa, Erwinia gerudensis
QLEQLMTQLRARLKRLMAM

SEQ ID NO: 794 - protein, 436 aa, Bacillus subtilis
DDSAPYIGANDAWDLGYTGKGIKVAIIDTGVEYNHPDLKKNFGQYKGYDFVDNDYDPKETPTGDPRGEATDHGTHVAGTVAANGTIKGVAPDATLLAYRVLGPGGSGTTENVIAGVERAVQDGADVMNLSLGNSLNNPDWATSTALDWAMSEGVVAVTSNGNSGPNGWTVGSPGTSREAISVGATQLPLNEYAVTFGSYSSAKVMGYNKEDDVKALNNKEVELVEAGIGEAKDFEGKDLTGKVAVVKRGSIAFVDKADNAKKAGAIGMVVYNNLSGEIEANVPGMSVPTIKLSLEDGEKLVSALKAGETKTTFKLTVSKALGEQVADFSSRGPVMDTWMIKPDISAPGVNIVSTIPTHDPDHPYGYGSKQGTSMASPHIAGAVAVIKQAKPKWSVEQIKAAIMNTAVTLKDSDGEVYPHNAQGAGSARIMNAIKAD

SEQ ID NO: 795 - protein, 775 aa, Bacillus subtilis
SSKTSADLEKAEVFGDIDMTTSKKTTVIVELKEKSLAEAKEAGESQSKSKLKTARTQAKNKAIKAVKNGKVNREYEQVFSGFSMKLPANEIPKLLAVKDVKAVYPNVTYKTDNMKDKDVTISEDAVSPQMDDSAPYIGANDAWDLGYTGKGIKVAIIDTGVEYNHPDLKKNFGQYKGYDFVDNDYDPKETPTGDPRGEATDHGTHVAGTVAANGTIKGVAPDATLLAYRVLGPGGSGTTENVIAGVERAVQDGADVMNLSLGNSLNNPDWATSTALDWAMSEGVVAVTSNGNSGPNGWTVGSPGTSREAISVGATQLPLDEYAVTFGSYSSAKVMGYNKEDDVKALNNKEVELVEAGIGEAKDFEGKDLTGKVAVVKRGSIAFVDKADNAKKAGAIGMVVYNNLSGEIEANVPGMSVPTIKLSLEDGEKLVSALKAGETKTTFKLTVSKALGEQVADFSSRGPVMDTWMIKPDISAPGVNIVSTIPTHDPDHPYGYGSKQGTSMASPHIAGAVAVIKQAKPKWSVEQIKAAIMNTAVTLKDSDGEVYPHNAQGAGSARIMNAIKADSLVSPGSCSYGTFLKENGNETKNETFTIENQSSIRKSYTLEYSFNGSGISTSGTSRVVIPAHQTGKATARVKVNTKKTKAGTYEGTVIVREGGKTVAKVPTLLIVKEPDYPRVTSVSVSEGSVQGTYQIETYLPAGAEELAFLVYDSNLDFAGQAGIYKNQDKGYQYFDWDGTINGGTKLPAGEYYLLAYAANKGKSSQVLTEEPFTVE

SEQ ID NO: 796 - protein, 436 aa, Bacillus subtilis
DDSAPYIGANDAWDLGYTGKGIKVAIIDTGVEYNHPDLKKNFGQYKGYDFVDNDYDPKETPTGDPRGEATDHGTHVAGTVAANGTIKGVAPDATLLAYRVLGPGGSGTTENVIAGVERAVQDGADVMNLSLGNSLNNPDWATSTALDWAMSEGVVAVTSNGNSGPNGWTVGSPGTSREAISVGATQLPLDEYAVTFGSYSSAKVMGYNKEDDVKALNNKEVELVEAGIGEAKDFEGKDLTGKVAVVKRGSIAFVDKADNAKKAGAIGMVVYNNLSGEIEANVPGMSVPTIKLSLEDGEKLVSALKAGETKTTFKLTVSKALGEQVADFSSRGPVMDTWMIKPDISAPGVNIVSTIPTHDPDHPYGYGSKQGTSMASPHIAGAVAVIKQAKPKWSVEQIKAAIMNTAVTLKDSDGEVYPHNAQGAGSARIMNAIKAD

SEQ ID NO: 797 - protein, 31 aa, Bacillus subtilis
MKKGIIRFLLVSFVLFFALSTGITGVQAAPA
